(19) United States
(12) Patent Application Publication
(10) Pub. No.: US 2024/0299450 A1
(43) Pub. Date: Sep. 12, 2024

(54) USES OF AMPHIPHILES IN IMMUNE CELL THERAPY AND COMPOSITIONS THEREFOR

(71) Applicant: Elicio Therapeutics, Inc., Boston, MA (US)

(72) Inventors: Dylan DRAKES, Boston, MA (US); Peter C. DEMUTH, Boston, MA (US)

(21) Appl. No.: 18/281,112

(22) PCT Filed: Mar. 10, 2022
(86) PCT No.: PCT/US2022/019723

§ 371 Date: Sep. 8, 2023

Related U.S. Application Data
(60) Provisional application No. 63/306,247, filed on Feb. 3, 2022.
(60) Provisional application No. 63/286,854, filed on Dec. 7, 2021.
(60) Provisional application No. 63/255,829, filed on Oct. 14, 2021.
(60) Provisional application No. 63/159,237, filed on Mar. 10, 2021.

(51) Int. Cl. A61K 35/17; A61K 39/00; A61K 39/39; A61K 47/54; A61P 35/00; A61P 37/04

(52) U.S. Cl. CPC A61K 35/17; A61K 39/39; A61K 39/4611; A61K 39/4632; A61K 39/464464; A61K 39/464488; A61K 39/464838; A61K 47/544; A61P 35/00; A61P 37/04

(57) ABSTRACT

The disclosure features amphiphilic ligand conjugates including a peptide or a ligand for a mucosal-associated invariant T-cell and a lipid and T cell receptor modified immune cells. The disclosure also features compositions and methods of using the same, for example, to stimulate proliferation of T cell receptor expressing cells.

### CROSS-REFERENCE TO RELATED APPLICATIONS

[0001] The present application claims benefit of the filing dates of U.S. Provisional Application No. 63/159,237, filed Mar. 10, 2021, U.S. Provisional Application No. 63/255,829, filed Oct. 14, 2021, U.S. Provisional Application No. 63/286,854, filed Dec. 7, 2021, and U.S. Provisional Application No. 63/306,247, filed Feb. 3, 2022, each of which is hereby incorporated herein by reference in its entirety.

### SEQUENCE LISTING

[0002] The instant application contains a Sequence Listing which has been submitted electronically in ASCII format and is hereby incorporated by reference in its entirety. Said ASCII copy, created on Mar. 2, 2022, is named 51026-040WO5_Sequence_Listing_3_1_22_ST25 and is 980,231 bytes in size.

### BACKGROUND OF THE INVENTION

[0003] Cancer is one of the leading causes of death in the world, with over 14 million new cancer cases diagnosed and over eight million cancer deaths occurring each year. The American Cancer Society estimates 1,762,450 new cases of cancer and 606,880 cancer deaths in the United States in 2019. While several treatments for cancer have been developed, the disease still remains a significant problem.

[0004] There thus exists a need for improved treatments for cancer.

### SUMMARY OF THE INVENTION

[0005] The invention provides, inter alia, use of amphiphilic ligand conjugates including a lipid, a peptide, and optionally a linker, in combination with a T cell receptor (TCR) modified immune cell for stimulating an immune response in a subject.

[0006] In one aspect, the invention provides a method of stimulating an immune response to a target cell population or target tissue in a subject including administering to the subject (1) an amphiphilic ligand conjugate including a lipid, a peptide, and, optionally, a linker, and (2) a T-cell receptor (TCR) modified immune cell, wherein the TCR binds the peptide of the amphiphilic ligand conjugate.

[0007] In another aspect, the invention provides use of (1) an amphiphilic ligand conjugate including a lipid, a peptide, and, optionally, a linker, and (2) a T-cell receptor (TCR) modified immune cell, wherein the TCR binds the peptide of the amphiphilic ligand conjugate, for stimulating an immune response to a target cell population or target tissue in a subject.

[0008] In another aspect, the invention provides use of (1) an amphiphilic ligand conjugate including a lipid, a peptide, and, optionally, a linker, and (2) a T-cell receptor (TCR) modified immune cell, wherein the TCR binds the peptide of the amphiphilic ligand conjugate, for the manufacture of a medicament for stimulating an immune response to a target cell population or target tissue in a subject.

[0009] In another aspect, the invention provides (1) an amphiphilic ligand conjugate including a lipid, a peptide, and, optionally, a linker, and (2) a T-cell receptor (TCR) modified immune cell, wherein the TCR binds the peptide of the amphiphilic ligand conjugate, for use in stimulating an immune response to a target cell population or target tissue in a subject.

[0010] In another aspect, the invention provides a method of stimulating an immune response to a target cell population or target tissue in a subject including administering to the subject (1) an amphiphilic ligand conjugate comprising a lipid, a ligand for a mucosal-associated invariant T-cell (MAIT), and, optionally, a linker, and (2) a T-cell receptor (TCR) modified immune cell, wherein the TCR binds the ligand of the amphiphilic ligand conjugate.

[0011] In another aspect, the invention provides use of (1) an amphiphilic ligand conjugate including a lipid, a peptide, and, optionally, a linker, and (2) a T-cell receptor (TCR) modified immune cell, wherein the TCR binds the peptide of the amphiphilic ligand conjugate, for stimulating an immune response to a target cell population or target tissue in a subject.

[0012] In another aspect, the invention provides use of (1) an amphiphilic ligand conjugate including a lipid, a ligand for a MAIT cell, and, optionally, a linker, and (2) a T-cell receptor (TCR) modified immune cell, wherein the TCR binds the ligand of the amphiphilic ligand conjugate, for the manufacture of a medicament for stimulating an immune response to a target cell population or target tissue in a subject.

[0013] In another aspect, the invention provides (1) an amphiphilic ligand conjugate including a lipid, a ligand for a MAIT cell, and, optionally, a linker, and (2) a T-cell receptor (TCR) modified immune cell, wherein the TCR binds the ligand of the amphiphilic ligand conjugate, for use in stimulating an immune response to a target cell population or target tissue in a subject.

[0014] In another aspect, the invention provides a method of stimulating an immune response to a target cell population or target tissue in a subject including administering to the subject an amphiphilic ligand conjugate including a lipid, a ligand for a MAIT cell, and, optionally, a linker.

[0015] In another aspect, the invention provides use of an amphiphilic ligand conjugate including a lipid, a ligand for a MAIT cell, and, optionally, a linker, for stimulating an immune response to a target cell population or target tissue in a subject.

[0016] In another aspect, the invention provides use of an amphiphilic ligand conjugate including a lipid, a ligand for a MAIT cell, and, optionally, a linker, and for the manufacture of a medicament for stimulating an immune response to a target cell population or target tissue in a subject.

[0017] In some embodiments, the method further includes administering an adjuvant to the subject. In some embodiments, the adjuvant is an amphiphilic oligonucleotide conjugate including an immunostimulatory oligonucleotide conjugated to a lipid, with or without a linker.

[0018] In some embodiments, the lipid of the amphiphilic ligand conjugate inserts into a cell membrane under physiological conditions, binds albumin under physiological conditions, or both. In some embodiments, the lipid of the amphiphilic ligand conjugate is a diacyl lipid. In some embodiments, the diacyl lipid of the amphiphilic ligand conjugate includes acyl chains including 12-30 hydrocarbon units, 14-25 hydrocarbon units, 16-20 hydrocarbon units, or 12, 13, 14, 15, 16, 17, 18, 19, 20, 21, 22, 23, 24, 25, 26, 27, 28, 29 or 30 hydrocarbon units. In some embodiments, the lipid is 1,2-distearoyl-sn-glycero-3-phosphoethanolamine (DSPE). In some embodiments, the linker is selected from the group consisting of a hydrophilic polymer, a string of hydrophilic amino acids, a polysaccharide, and an oligonucleotide, or a combination thereof. In some embodiments, the linker includes “N” polyethylene glycol units, wherein N is between 24-50 (e.g., 24-30, 30-35, 35-40, 40-45, 45-50, 24-40, 35-50, or 30-40). In some embodiments, the linker includes PEG24-amido-PEG24. In some embodiments, the “N” polyethylene glycol units are consecutive.

[0019] In some embodiments, the peptide is an antigen, or a fragment thereof. In some embodiments, the fragment is an immunogenic fragment. In some embodiments, the antigen, or fragment thereof, is a tumor-associated antigen. In some embodiments, the antigen, or fragment thereof, includes between 3 amino acids and 50 amino acids (e.g., 3-10 amino acids, 10-20 amino acids, 20-30 amino acids, 30-40 amino acids, 40-50 amino acids, 5-20 amino acids, 30-50 amino acids, or 20-40 amino acids). In some embodiments, the antigen includes any one of Human papillomavirus (HPV) E6 protein (e.g., HPV-6 E6 protein (SEQ ID NO: 1172), HPV-11 E6 protein (SEQ ID NO: 1171), HPV-16 E6 protein (SEQ ID NO: 1169), or an HPV-18 E6 protein (SEQ ID NO: 1170)), HPV E7 protein (e.g., HPV-6 E7 protein (SEQ ID NO: 1173), HPV-11 E7 protein (SEQ ID NO: 1174), HPV-16 E7 protein (SEQ ID NO: 1175), or an HPV-18 E7 protein (SEQ ID NO: 1176)), Kirsten rat sarcoma (mKRAS) (SEQ ID NO: 1177) (e.g., G12A, G12C, G12D, G12E, G12F, G12H, G121, G12K, G12L, G12M, G12N, G12P, G12Q, G12R, G12S, G12T, G12V, G12W, G12Y, G13C, G13D, Q61A, Q61C, Q61 E, Q61F, Q61G, Q61H, Q611, Q61K, Q61L, Q61M, Q61N, Q61N, Q61P, Q61R, Q61T, Q61V, and Q61W variants), Wilms tumor 1 (WT-1) (SEQ ID NO: 19), New York Esophageal Squamous Cell Carcinoma (NYESO) (SEQ ID NO: 9), Mucin 1 (MUC1) (SEQ ID NO: 67), Epidermal growth factor receptor (EGFR) (SEQ ID NO: 1125), Epidermal growth factor receptor variant III (EGFRviii), Phosphoinositide 3-kinase (PI3K) (SEQ ID NO: 1126), Latent membrane protein 2 (LMP2) (SEQ ID NO: 17), Receptor tyrosine-protein kinase erbB-2 (HER-2/neu) SEQ ID NO: 70), Melanoma antigen A3 (MAGE A3) (SEQ ID NO: 12), p53 wild-type (SEQ ID NOS: 86 and 89), p53 mutant, Prostate-specific membrane antigen (PSMA) (SEQ ID NO: 1127), Ganglioside G2 (GD2), Ganglioside G3 (GD3), Carcinoembryonic antigen (CEA) (SEQ ID NO: 1128), Melanoma antigen recognized by T cells (MelanA/MART-1) (SEQ ID NO: 8), Glycoprotein 100 (gp100) (SEQ ID NO: 1129), Proteinase3 (SEQ ID NO: 1130), Breakpoint cluster region protein-Tyrosine protein kinase (bcr-abl) (SEQ ID NO: 1131), Tyrosinase (SEQ ID NOS: 11 and 25), Survivin (SEQ ID NO: 1132), Prostate-specific antigen (PSA) (SEQ ID NO: 1133), human Telomerase reverse transcriptase (hTERT) (SEQ ID NO: 1134), Ephrin type-A receptor 2 (EphA2) (SEQ ID NO: 1135), Pancreatitis associated protein (PAP) (SEQ ID NO:1136), Mucolipidaryl hydrocarbon receptor-interacting protein (ML-AIP) (SEQ ID NO: 1178), Alpha fetoprotein (AFP) (SEQ ID NO: 1137), Epithelial cell adhesion molecule (EpCAM) (SEQ ID NO: 1138), ETS-related gene (ERG) (SEQ ID NO: 1139) (e.g., TMOPRSS2 ETS fusion), NA17 (SEQ ID NO: 1140), Paired Box 3 (PAX3) (SEQ ID NO: 1141), Anaplastic lymphoma kinase (ALK) (SEQ ID NO: 1142), androgen receptor (SEQ ID NO: 1143), Cyclin B (SEQ ID NO: 1144), N-myc proto-oncogene protein (MYCN) (SEQ ID NO: 1145), Rho protein coding (RhoC) (SEQ ID NO: 1146), Tyrosinase-related protein-2 (TRP-2) (SEQ ID NO: 1147), Mesothelin (SEQ ID NO: 1148), Prostate stem cell antigen (PSCA) (SEQ ID NO:1149), Melanoma antigen A1 (MAGE A1) (SEQ ID NO: 15), Cytochrome P450 Family 1 Subfamily B Member 1 (CYP1 B1) (SEQ ID NO: 1150), Placenta-specific protein 1 precursor (PLAC1) (SEQ ID NO: 1151), Monosialodihexosylganglioside (GM3), Brother of regulator of imprinted sites (BORIS) (SEQ ID NO: 1152), Tenascin (Tn) (SEQ ID NO: 1153), Globohexasylceraminde (GloboH), Translocation-Ets-leukemia virus protein-6—acute myeloid leukemia 1 protein (ETV6-AML) (SEQ ID NO: 1154), NY breast cancer antigen 1 (NY-BR-1) (SEQ ID NO: 1179), Regulator of G protein signaling 5 (RGS5) (SEQ ID NO: 1155), Squamous cell carcinoma antigen recognized by T cells 3 (SART3) (SEQ ID NOS: 1156), Salmonella enterotoxin (STn) (SEQ ID NO: 1157), Carbonic Anhydrase IX (SEQ ID NO: 42), Paired box gene 5 (PAXS) (SEQ ID NO: 1158), Cancer testis antigen (OY-TES1) (SEQ ID NO: 1159), Tyrosine-protein kinase Lck (LCK) (SEQ ID NO: 1160), human high molecular weight-melanoma associated antigen (HMWMAA) (SEQ ID NO: 1180), A-kinase anchoring protein 4 (AKAP-4) (SEQ ID NO: 1161), Protein SSX2 (SSX2) (SEQ ID NO: 88), X-antigen family member 1 (XAGE-1) (SEQ ID NO: 1162), B7 homolog 3 (B7H3) (SEQ ID NO: 1163), Legumain (SEQ ID NO: 1164), Tyrosine-protein kinase receptor (Tie 2) (SEQ ID NO: 1165), P antigen family member 4 (Page4) (SEQ ID NO: 1166), Vascular endothelial growth factor receptor 2 (VEGFR2) (SEQ ID NO: 1167), Melanoma-cancer testis antigen 1 (MAD-CT-1) (SEQ ID NO: 1182), Fibroblast activation protein (FAP) (SEQ ID NO: 1181), Platelet derived growth factor receptor beta (PDGFR-B) (SEQ ID NO: 1168), Melanoma-cancer testis antigen 2 (MAD-CT-2) (SEQ ID NO: 1183). In some embodiments, the antigen includes a fragment of the sequence of any one of SEQ ID NOs: 1-97 or 1125-1183, or includes Ganglioside G2 or Ganglioside G3. In some embodiments, the peptide includes an amino acid sequence of any one of SEQ ID NOs: 98-1123. In some embodiments, the ligand for a MAIT cell is a small molecule metabolite ligand. In some embodiments, the ligand for a MAIT cell is a valine-citrulline-p-aminobenzyl carbamate modified ligand. In some embodiments, the valine-citrulline-p-aminobenzyl carbamate modified ligand is a valine-citrulline-p-aminobenzyl carbamate modified 5-amino-6-D-ribityl prodrug. In some embodiments, the ligand for a MAIT cell is a riboflavin metabolite or a drug metabolite. In some embodiments, the riboflavin metabolite is 5-(2-oxopropylideneamino)-6-d-ribitylaminouracil, 5-(2-oxoethylideneamino)-6-D-ribitylaminouracil, 6,7-dimethyl-8-D-ribityllumazine, 7-hydroxy-6-methyl-8-D-ribityllumazine, 6-hydroxymethyl-8-D-ribityl-lumazine, 6-(1H-indol-3-yl)-7-hydroxy-8-ribityllumazine, or 6-(2-carboxyethyl)-7-hydroxy8-ribityllumazine. In some embodiments, the drug metabolite is benzbromarone, chloroxine, diclofenac, 5-hydroxy diclofenac, 4-hydroxy diclofenac, floxuridine, galangin, menadione sodium bisulfate, mercaptopurine, or tetrahydroxy-1,4-quinone hydrate.

[0020] In some embodiments, the amphiphilic ligand conjugate is trafficked to a lymph node. In some embodiments, the amphiphilic ligand conjugate is trafficked to an inguinal lymph node or an axillary lymph node. In some embodiments, the amphiphilic ligand conjugate is retained in the lymph node for at least 4 days, at least 5 days, at least 6 days, at least 7 days, at least 8 days, at least 9 days, at least 10 days, at least 11 days, at least 12 days, at least 13 days, at least 14 days, at least 15 days, at least 16 days, at least 17 days, at least 18 days, at least 19 days, at least 20 days, at least 21 days, at least 22 days, at least 23 days, at least 24 days, or at least 25 days.

[0021] In some embodiments, the immune cell is a T cell, a B cell, a natural killer (NK) cell, a macrophage, a neutrophil, a dendritic cell, a mast cell, an eosinophil, or a basophil. In some embodiments, the immune cell is a T cell. In some embodiments, the immune cell is a human mucosal-associated T (MAIT) cell.

[0022] In some embodiments, the immune response is an anti-tumor immune response. In some embodiments, the target cell population or the target tissue is a tumor cell population or a tumor tissue. In some embodiments, the method includes reducing or decreasing the size of the tumor tissue or inhibiting growth of the tumor cell population or the tumor tissue in the subject. In some embodiments, the method includes activating the immune cell, expanding the immune cell, and/or increasing proliferation of the immune cell. In some embodiments, activating the immune cell, expanding the immune cell, and/or increasing proliferation of the immune cell is performed ex vivo. In some embodiments, activating the immune cell, expanding the immune cell, and/or increasing proliferation of the immune cell is performed in vivo.

[0023] In some embodiments, the subject has a disease, a disorder, or a condition associated with expression or elevated expression of the antigen. In some embodiments, the subject is lymphodepleted prior to the administration of the amphiphilic ligand conjugate and TCR modified immune cell. In some embodiments, the lymphodepletion is by sublethal irradiation. In some embodiments, the subject is administered the amphiphilic ligand conjugate prior to receiving the immune cell including the TCR. In some embodiments, the subject is administered the amphiphilic ligand conjugate after receiving the immune cell including the TCR. In some embodiments, the amphiphilic ligand conjugate and the immune cell including the TCR are administered simultaneously.

[0024] In some embodiments, the amphiphilic ligand conjugate and/or the TCR modified immune cell are administered in a composition including a pharmaceutically acceptable carrier. In some embodiments, the composition further includes an adjuvant. In some embodiments, the adjuvant is an amphiphilic oligonucleotide conjugate including an immunostimulatory oligonucleotide conjugated to a lipid, with or without a linker.

[0025] In another aspect, the invention provides a method of activating, proliferating, phenotypically maturing, or inducing acquisition of cytotoxic function of a TCR modified T-cell in vitro, including culturing the TCR modified T-cell in the presence of a dendritic cell including an amphiphilic ligand conjugate including a lipid, a peptide, and, optionally, a linker.

[0026] In a further aspect, the invention provides an amphiphilic ligand conjugate including a lipid, a peptide, and, optionally, a linker, where peptide includes an amino acid sequence of any one of SEQ ID NOs: 98-1123.

[0027] In another aspect, the invention provides an amphiphilic ligand conjugate including a lipid, a peptide, and, optionally, a linker, where peptide includes a fragment of the sequence of any one of SEQ ID NOs: 1-97 or 1125-1183, or includes Ganglioside G2 or Ganglioside G3.

[0028] In another aspect, the invention provides a method of activating, proliferating, phenotypically maturing, or inducing acquisition of cytotoxic function of a TCR modified T-cell in vitro, including culturing the TCR modified T-cell in the presence of a dendritic cell including an amphiphilic ligand conjugate including a lipid, a ligand for a MAIT cell, and, optionally, a linker.

### BRIEF DESCRIPTION OF THE DRAWINGS

[0029] FIG. 1A-FIG. 1B are graphs showing the number of pmel T cells in the peripheral blood of mice, that were administered 5×10⁵ B16F110 melanoma tumor cells on day −7, 5 days (FIG. 1A) and 19 days (FIG. 11B) after being administered PBS (leftmost, circles), soluble (sol) gp100 (middle, circles), amphiphilic (amph) gp100 (rightmost, circles), 1×10⁶ pmel T cells (leftmost, squares), 1×10⁶ pmel T cells and soluble gp100 (middle squares), 1×10⁶ pmel T cells and amphiphilic gp100 (rightmost, squares), 5×10⁶ pmel T cells (leftmost, triangles), 5×10⁶ pmel T cells and soluble gp100 (middle, triangles), or 5×10⁶ pmel T cells and amphiphilic gp100 (rightmost, triangles), where each was observed in 5 mice (n=5).

[0030] FIG. 2A is a graph showing the percentage of mouse survival over time after being injected with 5×10⁵ B16F110 melanoma tumor cells on day −7 for mice who were administered PBS (middle, dotted line), soluble gp100 (leftmost, dotted line), amphiphilic gp100 (rightmost, dotted line), 1×10⁶ pmel T cells (leftmost, dashed line), 1×10⁶ pmel T cells and soluble gp100 (middle dashed line), 1×10⁶ pmel T cells and amphiphilic gp100 (rightmost, dashed line), 5×10⁶ pmel T cells (leftmost, solid line), 5×10⁶ pmel T cells and soluble gp100 (middle, solid line), or 5×10⁶ pmel T cells and amphiphilic gp100 (rightmost, solid line), where 10 mice were observed for each group (n=10).

[0031] FIG. 2B is a graph showing the tumor volume in mice over time after being injected with 5×10⁵ B16F110 melanoma tumor cells on day −7 for mice who were administered PBS (middle, dotted line and circles), soluble gp100 (leftmost, dotted line and circles), amphiphilic gp100 (rightmost, dotted line and circles), 1×10⁶ pmel T cells (leftmost, dashed line and squares), 1×10⁶ pmel T cells and soluble gp100 (middle, dashed line and squares), 1×10⁶ pmel T cells and amphiphilic gp100 (rightmost, dashed line and squares), 5×10⁶ pmel T cells (leftmost, solid line and triangles), 5×10⁶ pmel T cells and soluble gp100 (middle, solid line and triangles), or 5×10⁶ pmel T cells and amphiphilic gp100 (rightmost, solid line and triangles), where 5 or 10 mice were observed for each group (n=5 or 10).

[0032] FIG. 3A-FIG. 3D are graphs showing the number of pmel T cells in the peripheral blood of mice which had previously rejected a tumor following adoptive T cell transfer and administration of 1×10⁶ pmel T cells and 10 μg of amphiphilic gp100 (squares) or 5×10⁶ pmel T cells and 10 μg of amphiphilic gp100 vaccine (triangles) in comparison to a tumor naïve control group (circles) that were challenged with a second 5×10⁵ dose of B16F10 melanoma tumor cells on day 75 post initial adoptive T cell transfer after 0 days (FIG. 3A), 7 days (FIG. 3B), 14 days (FIG. 3C), and 21 days (FIG. 3D), where 4 or 7 mice were observed for each group (n=4 or 7).

[0033] FIG. 4A is a graph showing the survival rate of mice over time that had previously rejected a tumor following adoptive T cell transfer and administration of 1×10⁶ pmel T cells and 10 μg of amphiphilic gp100 (dashed line) or 5×10⁶ pmel T cells and 10 μg of amphiphilic gp100 vaccine (solid line staying at 100% survival) in comparison to a tumor naïve control group (solid line dropping towards 0% survival past 20 days) that were challenged with a second 5×10⁵ dose of B116F110 melanoma tumor cells on day 75 post initial adoptive T cell transfer, where 4 or 7 mice were observed for each group (n=4 or 7).

[0034] FIG. 4B is a graph showing the tumor volume in mice over time that had previously rejected a tumor following adoptive T cell transfer and administration of 1×10⁶ pmel T cells and 10 μg of amphiphilic gp100 (dashed line) or 5×10⁶ pmel T cells and 10 μg of amphiphilic gp100 vaccine (flat solid line at 0) in comparison to a tumor naïve control group (solid lines, left of dashed line) that were challenged with a second 5×10⁵ dose of B16F10 melanoma tumor cells on day 75 post initial adoptive T cell transfer, where 4 or 7 mice were observed for each group (n=4 or 7).

[0035] FIG. 5A and FIG. 5B are graphs showing the amount of pmel T cells in peripheral blood from mice that previously rejected a tumor following adoptive T cell transfer and administration of 1×10⁶ pmel T cells and 10 μg of amphiphilic gp100 (squares) or 5×10⁶ pmel T cells and 10 μg of amphiphilic gp100 vaccine (triangles) in comparison to a tumor naïve control group (circles) that were challenged with a second 5×10⁵ dose of B16F10 melanoma tumor cells on day 75 post initial adoptive T cell transfer 7 days after re-challenge (FIG. 5A) and 14 days after re-challenge (FIG. 5B), where 4 or 5 mice were observed for each group (n=4 or 5).

[0036] FIG. 5C is a graph showing the number of CD8+ T cells with intracellular cytokine levels of IFN+ (bottom of each column), TNF+ (middle of each column), and both IFN+ and TNF+ (top of each column) for cells that were pulsed with Trp1 and Trp2 peptides before staining and were collected from mice 14 days after the mice were challenged with a second 5×10⁵ dose of B16F110 melanoma tumor cells on day 75 post initial adoptive T cell transfer with 1×10⁶ pmel T cells and 10 μg of amphiphilic gp100 or 5×10⁶ pmel T cells and 10 μg of amphiphilic gp100 vaccine in comparison to a tumor naïve control group, where 4 or 5 mice were observed for each group (n=4 or 5).

[0037] FIG. 6A is a graph showing the survival of mice that had previously rejected a tumor following adoptive T cell transfer of 1×10⁶ pmel T cells (dashed line) or 5×10⁶ pmel T cells (rightmost, solid line) vaccinated with 10 μg of amphiphilic gp100 in comparison to a control (leftmost, solid line dropping to 0% survival before day 20) after the mice had been challenged 2× higher dose of 1×10⁶ B16F110 melanoma tumor cells 75 days after initial adoptive transfer and 82 days after first being injected with tumor cells, where 4 or 5 mice were observed for each group (n=4 or 5).

[0038] FIG. 6B is a graph showing the tumor volume in mice over time that had previously rejected tumor following adoptive T cell transfer of 1×10⁶ pmel T cells (dashed lines) or 5×10⁶ pmel T cells (rightmost, solid lines) vaccinated with 10 μg of amphiphilic gp100 in comparison to a control (solid lines to the left of the dashed lines) after the mice had been challenged 2× higher doses of 1×10⁶ B116F110 melanoma tumor cells 75 days after initial adoptive transfer and 82 days after first being injected with tumor cells, where 4 or 5 mice were observed for each group (n=4 or 5).

[0039] FIG. 7 is a graph showing the number of pmel T cells in the tumor cells of mice, who were administered 5×10⁵ B116F10 melanoma tumor cells on day −7, 7 days after being administered PBS (leftmost, circles), soluble gp100 (middle, circles), amphiphilic gp100 (rightmost, circles), 1×10⁶ pmel T cells (leftmost, squares), 1×10⁶ pmel T cells and soluble gp100 (middle squares), 1×10⁶ pmel T cells and amphiphilic gp100 (rightmost, squares), 5×10⁶ pmel T cells (leftmost, triangles), 5×10⁶ pmel T cells and soluble gp100 (middle, triangles), or 5×10⁶ pmel T cells and amphiphilic gp100 (rightmost, triangles), where each was observed in 9 or 10 mice (n=9 or 10).

[0040] FIG. 8A and FIG. 8B are graphs showing the number of CD8+ T cells (FIG. 8A) and the ratio of CD8+:CD4+ T cells (FIG. 8B) in the tumor cells of mice, who were administered 5×10⁵ B116F110 melanoma tumor cells on day −7, 7 days after being administered PBS (leftmost, circles), soluble gp100 (middle, circles), amphiphilic gp100 (rightmost, circles), 1×10⁶ pmel T cells (leftmost, squares), 1×10⁶ pmel T cells and soluble gp100 (middle squares), 1×10⁶ pmel T cells and amphiphilic gp100 (rightmost, squares), 5×10⁶ pmel T cells (leftmost, triangles), 5×10⁶ pmel T cells and soluble gp100 (middle, triangles), or 5×10⁶ pmel T cells and amphiphilic gp100 (rightmost, triangles), where each was observed in 9 or 10 mice (n=9 or 10).

[0041] FIG. 9 is a graph showing the number of CD8+, CD25+ T cells in the tumor cells of mice, who were administered 5×10⁵ B116F110 melanoma tumor cells on day −7, 7 days after being administered PBS (leftmost, circles), soluble gp100 (middle, circles), amphiphilic gp100 (rightmost, circles), 1×10⁶ pmel T cells (leftmost, squares), 1×10⁶ pmel T cells and soluble gp100 (middle squares), 1×10⁶ pmel T cells and amphiphilic gp100 (rightmost, squares), 5×10⁶ pmel T cells (leftmost, triangles), 5×10⁶ pmel T cells and soluble gp100 (middle, triangles), or 5×10⁶ pmel T cells and amphiphilic gp100 (rightmost, triangles), where each was observed in 9 or 10 mice (n=9 or 10).

[0042] FIG. 10 is a graph showing the number of PD-1+(bottom of each column); PD-1+ and TIM3+ or LAG3+(middle of each column); and PD-1+, TIM3+, and LAG3+(top of each column) in the tumor cells of mice, who were administered 5×10⁵ B116F10 melanoma tumor cells on day −7, 7 days after being administered PBS, soluble gp100, amphiphilic gp100, 1×10⁶ pmel T cells (leftmost, squares), 1×10⁶ pmel T cells and soluble gp100, 1×10⁶ pmel T cells and amphiphilic gp100, 5×10⁶ pmel T cells, 5×10⁶ pmel T cells and soluble gp100, or 5×10⁶ pmel T cells and amphiphilic gp100, where each was observed in 9 or 10 mice (n=9 or 10).

[0043] FIG. 11 is a graph showing the number of pmel T cells that are naïve, central memory (CM), or effector (Eff) T cells in the tumor cells of mice, who were administered 5×10⁵ B16F110 melanoma tumor cells on day −7, 7 days after being administered PBS (leftmost, circles), soluble gp100 (middle, circles), amphiphilic gp100 (rightmost, circles), 1×10⁶ pmel T cells (leftmost, squares), 1×10⁶ pmel T cells and soluble gp100 (middle squares), 1×10⁶ pmel T cells and amphiphilic gp100 (rightmost, squares), 5×10⁶ pmel T cells (leftmost, triangles), 5×10⁶ pmel T cells and soluble gp100 (middle, triangles), or 5×10⁶ pmel T cells and amphiphilic gp100 (rightmost, triangles), where each was observed in 9 or 10 mice (n=9 or 10).

[0044] FIG. 12A is graph showing number of Ki67+ and CD8+ pmel T cells in the tumor cells of mice, who were administered 5×10⁵ B116F110 melanoma tumor cells on day −7, 7 days after being administered PBS (leftmost, circles), soluble gp100 (middle, circles), amphiphilic gp100 (rightmost, circles), 1×10⁶ pmel T cells (leftmost, squares), 1×10⁶ pmel T cells and soluble gp100 (middle squares), 1×10⁶ pmel T cells and amphiphilic gp100 (rightmost, squares), 5×10⁶ pmel T cells (leftmost, triangles), 5×10⁶ pmel T cells and soluble gp100 (middle, triangles), or 5×10⁶ pmel T cells and amphiphilic gp100 (rightmost, triangles), where each was observed in 9 or 10 mice (n=9 or 10).

[0045] FIG. 12B is graph showing the number of CD8+ pmel T cells that show IFN+(bottom of each column), GrzB+ (middle of each column), and IFN+ and GrzB+ (top of each column) cytokine secretion in the tumor cells of mice, who were administered 5×10⁵ B16F110 melanoma tumor cells on day −7, 7 days after being administered PBS, soluble gp100, amphiphilic gp100, 1×10⁶ pmel T cells, 1×10⁶ pmel T cells and soluble gp100, 1×10⁶ pmel T cells and amphiphilic gp100, 5×10⁶ pmel T cells, 5×10⁶ pmel T cells and soluble gp100, or 5×10⁶ pmel T cells and amphiphilic gp100, where each was observed in 9 or 10 mice (n=9 or 10).

[0046] FIG. 13 is graph showing the number of CD8+ pmel T cells, that were pulsed with EGP peptides, that show IFN+(bottom of each column), GrzB+ (middle of each column), and IFN+ and GrzB+ (top of each column) cytokine secretion in the tumor cells of mice, who were administered 5×10⁵ B16F10 melanoma tumor cells on day −7, 7 days after being administered PBS, soluble gp100, amphiphilic gp100, 1×10⁶ pmel T cells, 1×10⁶ pmel T cells and soluble gp100, 1×10⁶ pmel T cells and amphiphilic gp100, 5×10⁶ pmel T cells, 5×10⁶ pmel T cells and soluble gp100, or 5×10⁶ pmel T cells and amphiphilic gp100, where each was observed in 9 or 10 mice (n=9 or 10).

[0047] FIG. 14A and FIG. 14B are graphs showing the number of CD8+ pmel T cells, that were pulsed with Trp1 peptides (FIG. 14A) or Trp2 peptides (FIG. 14B), that show IFN+ secretion (bottom of each column), GrzB+ (middle of each column), and IFN+ and GrzB+ (top of each column) cytokine secretion in the tumor cells of mice, who were administered 5×10⁵ B16F110 melanoma tumor cells on day −7, 7 days after being administered PBS, soluble gp100, amphiphilic gp100, 1×10⁶ pmel T cells, 1×10⁶ pmel T cells and soluble gp100, 1×106 pmel T cells and amphiphilic gp100, 5×106 pmel T cells, 5×106 pmel T cells and soluble gp100, or 5×106 pmel T cells and amphiphilic gp100, where each was observed in 9 or 10 mice (n=9 or 10).

[0048] FIG. 15 is a graph showing the number of pmel T cells in the peripheral blood cells of mice, who were administered 5×10⁵ B16F110 melanoma tumor cells on day −7, 7 days after being administered PBS (leftmost, circles), soluble gp100 (middle, circles), amphiphilic gp100 (rightmost, circles), 1×10⁶ pmel T cells (leftmost, squares), 1×10⁶ pmel T cells and soluble gp100 (middle squares), 1×10⁶ pmel T cells and amphiphilic gp100 (rightmost, squares), 5×10⁶ pmel T cells (leftmost, triangles), 5×10⁶ pmel T cells and soluble gp100 (middle, triangles), or 5×10⁶ pmel T cells and amphiphilic gp100 (rightmost, triangles), where each was observed in 9 or 10 mice (n=9 or 10).

[0049] FIG. 16 is a graph showing the number of CD8+ T cells in the peripheral blood cells of mice, who were administered 5×10⁵ B16F110 melanoma tumor cells on day −7, 7 days after being administered PBS (leftmost, circles), soluble gp100 (middle, circles), amphiphilic gp100 (rightmost, circles), 1×10⁶ pmel T cells (leftmost, squares), 1×10⁶ pmel T cells and soluble gp100 (middle squares), 1×10⁶ pmel T cells and amphiphilic gp100 (rightmost, squares), 5×10⁶ pmel T cells (leftmost, triangles), 5×10⁶ pmel T cells and soluble gp100 (middle, triangles), or 5×10⁶ pmel T cells and amphiphilic gp100 (rightmost, triangles), where each was observed in 9 or 10 mice (n=9 or 10).

[0050] FIG. 17 is graph showing the number of CD8+ pmel T cells, that were pulsed with EGP peptides, that show IFN+(bottom of each column), GrzB+ (middle of each column), and IFN+ and GrzB+ (top of each column) cytokine secretion in the peripheral blood cells of mice, who were administered 5×10⁵ B16F10 melanoma tumor cells on day −7, 7 days after being administered PBS, soluble gp100, amphiphilic gp100, 1×10⁶ pmel T cells, 1×10⁶ pmel T cells and soluble gp100, 1×10⁶ pmel T cells and amphiphilic gp100, 5×10⁶ pmel T cells, 5×10⁶ pmel T cells and soluble gp100, or 5×10⁶ pmel T cells and amphiphilic gp100, where each was observed in 9 or 10 mice (n=9 or 10).

[0051] FIG. 18A and FIG. 18B are graphs showing the number of CD8+ pmel T cells, that were pulsed with Trp1 peptides (FIG. 18A) or Trp2 peptides (FIG. 18B), that show IFN+(bottom of each column), TNF+ (middle of each column), and IFN+ and TNF+ (top of each column) cytokine secretion in the peripheral blood cells of mice, who were administered 5×10⁵ B116F110 melanoma tumor cells on day −7, 7 days after being administered PBS, soluble gp100, amphiphilic gp100, 1×10⁶ pmel T cells, 1×10⁶ pmel T cells and soluble gp100, 1×10⁶ pmel T cells and amphiphilic gp100, 5×10⁶ pmel T cells, 5×10⁶ pmel T cells and soluble gp100, or 5×10⁶ pmel T cells and amphiphilic gp100, where each was observed in 9 or 10 mice (n=9 or 10).

[0052] FIG. 19 is a graph showing the number of CD8+ T cells in the lymph nodes (LN) of mice, who were administered 5×10⁵ B116F110 melanoma tumor cells on day −7, 7 days after being administered PBS (leftmost, circles), soluble gp100 (middle, circles), amphiphilic gp100 (rightmost, circles), 1×10⁶ pmel T cells (leftmost, squares), 1×10⁶ pmel T cells and soluble gp100 (middle squares), 1×10⁶ pmel T cells and amphiphilic gp100 (rightmost, squares), 5×10⁶ pmel T cells (leftmost, triangles), 5×10⁶ pmel T cells and soluble gp100 (middle, triangles), or 5×10⁶ pmel T cells and amphiphilic gp100 (rightmost, triangles), where each was observed in 9 or 10 mice (n=9 or 10).

[0053] FIG. 20 is a graph showing the number of pmel T cells in the lymph nodes of mice, who were administered 5×10⁵ B116F110 melanoma tumor cells on day −7, 7 days after being administered PBS (leftmost, circles), soluble gp100 (middle, circles), amphiphilic gp100 (rightmost, circles), 1×10⁶ pmel T cells (leftmost, squares), 1×10⁶ pmel T cells and soluble gp100 (middle squares), 1×10⁶ pmel T cells and amphiphilic gp100 (rightmost, squares), 5×10⁶ pmel T cells (leftmost, triangles), 5×10⁶ pmel T cells and soluble gp100 (middle, triangles), or 5×10⁶ pmel T cells and amphiphilic gp100 (rightmost, triangles), where each was observed in 9 or 10 mice (n=9 or 10).

[0054] FIG. 21A is a graph showing percentage of CD25+, CD69+, and CD25+ and CD69+ T cells that were also CD8+ T cells in naïve pmel T cells that were isolated from splenocytes of mice and cocultured with dendritic cells (DC2.4) that were labelled with nothing (leftmost in % CD25, % CD69, and % CD25, CD69 groups), labelled with soluble gp100 (middle in % CD25, % CD69, and % CD25, CD69 groups), or labelled with amphiphilic gp100 (leftmost in % CD25, % CD69, and % CD25, CD69 groups).

[0055] FIG. 21B is a graph showing percent lysis of tumor cells expressing firefly luciferase when co-cultured with adoptively transferred T cells at various effector-to-target (E:T) ratios in triplicate, where, from bottom of the graph to top of the graph, the T cells were unactivated, the T cells were co-cultured with DC2.4 wild-type cells, the T cells were cocultured with DC2.4 cells labeled with soluble gp100, or the T cells were cocultured with DC2.4 cells labeled with amphiphilic gp100.

[0056] FIG. 22A is a graph showing the percentage of T cells spinoculated with viral supernatant collected from mCherry transfected Phoenix-ECO cells that were activated with CD25, CD69, or CD25 and CD69 after being cocultured with wild-type DC 2.4, DC 2.4 cells labeled with soluble gp100, or DC 2.4 cells labeled with amphiphilic gp100. For the mCherry, pmel T cells on day 0 (leftmost column) the percentage of T cells with CD25 is on the bottom of the column and the percentage with CD69 is on top. For the mCherry, pmel T cells cocultured with DC 2.4 labeled with soluble gp100, the percentage of T cells with CD25 is on the bottom of the column and the percentage with both CD25 and CD69 is on the top of the column. For the mCherry, pmel T cells coculture with DC 2.4 labeled with amphiphilic gp100, the percentage of T cells with CD25 is on the bottom of the column, the percentage of cells with CD69 is in the middle of the column, and the percentage of T cells with both CD25 and CD69 is on the top of the column.

[0057] FIG. 22B is a graph showing the percent lysis of tumor cells expressing firefly luciferase when co-cultured with adoptively transferred T cells spinoculated with viral supernatant collected from mCherry at various effector-to-target (E:T) ratios in triplicate, where the T cells were unactivated (grey circles), the T cells were co-cultured with DC2.4 wild-type cells (black circles), the T cells were cocultured with DC2.4 cells labeled with soluble gp100 (squares), the T cells were cocultured with DC2.4 cells labeled with amphiphilic gp100 (triangles), or the T cells were cocultured with DC2.4 cells labeled with amphiphilic fluorescein isothiocyanate (FITC) (diamonds).

[0058] FIG. 23 is a graph showing dendritic cell activation in the lymph nodes of mice vaccinated with PBS (leftmost set of data), soluble (sol) gp100 (middle set of data), or amphiphilic (amp) gp100 (rightmost set of data) by measuring the mean fluorescence intensity (MFI) to analyze the activation for, from left to right in each set of data, CD40+, CD80+, CD86+, and MHC II+.

[0059] FIG. 24 is a graph of the number of pmel T cells that were isolated from splenocytes of mice and cultured in a 1:1 ratio with lymph node homogenate of mice vaccinated with PBS (black circles), soluble gp100 (squares), or amphiphilic gp100 (triangles) in comparison to pmel T cells alone (gray circles) over a period of 0 to 6 days.

[0060] FIG. 25A is graph showing the amount of IFNγ produced by unstimulated pmel T cells, pmel T cells cocultured with lymph node homogenate of mice vaccinated with PBS, soluble gp100, or amphiphilic gp100, after the pmel T cells with cocultured for 24 hours.

[0061] FIG. 25B is a graph showing the pmel T cell activation with CD25+, CD69+, or CD25+ and CD69+, in pmel T cell that were cocultured with lymph node homogenate of mice vaccinated with PBS, soluble gp100, or amphiphilic gp100 for 1, 3, or 6 days in comparison to an unstimulated pmel T cell control. The bottom section of each column indicates the percentage of CD25+ pmel T cells, the middle section indicates the percentage of CD69+ pmel Tcells, and the top section indicates the percentage of CD25+ and CD69+ pmel Tcells.

[0062] FIG. 26A is a graph showing the percent lysis of tumor cells expressing firefly luciferase when co cultured with adoptively transferred T cells at various effector-to-target (E:T) ratios in triplicate, where the T cells were unstimulated (grey circles) or the T cells were co-cultured with lymph node homogenate of mice vaccinated with PBS (black circles), soluble gp100 (squares), or amphiphilic gp100 (triangles) after the cells were cocultured for 1 day.

[0063] FIG. 26B is a series of graphs showing the amount of cytokines produced, including IFNγ, IL-2, and TNFα, as a result of co-culturing pmel T cells with lymph node homogenate of mice vaccinated with PBS (black circles), soluble gp100 (squares), or amphiphilic gp100 (triangles), in comparison to unstimulated pmel T cells (gray circles) after the cells were cocultured for 1 day.

[0064] FIG. 27A is a graph showing the percent lysis of tumor cells expressing firefly luciferase when co cultured with adoptively transferred T cells at various effector-to-target (E:T) ratios in triplicate, where the T cells were unstimulated (grey circles) or the T cells were co-cultured with lymph node homogenate of mice vaccinated with PBS (black circles), soluble gp100 (squares), or amphiphilic gp100 (triangles) after the cells were cocultured for 7 days.

[0065] FIG. 27B is a series of graphs showing the amount of cytokines produced, including IFNγ, IL-2, and TNFα, as a result of co-culturing pmel T cells with lymph node homogenate of mice vaccinated with PBS (black circles), soluble gp100 (squares), or amphiphilic gp100 (triangles), in comparison to unstimulated pmel T cells (gray circles), after the cells were cocultured for 7 days.

[0066] FIG. 28 is a graph showing the number of pmel T cells spinoculated with viral supernatant collected from mCherry transfected Phoenix-ECO cells in mice that were administered 10 μg of soluble gp100 (squares) or 10 μg of amphiphilic gp100 (triangles) in comparison to an untreated control (circles) either 5 days of 19 days after the T cell infusion, where red blood cells were collected from between 1 and 9 mice for each group (n=1-n=9).

[0067] FIG. 29A is a graph showing tumor volume in mice over time after treatment with 1×10⁶ T cells spinoculated with viral supernatant collected from mCherry transfected Phoenix-ECO cells (solid lines labelled A), 1×10⁶ T cells and soluble gp100 (solid lines labelled B), or 1×10⁶ T cells and amphiphilic gp100 (solid lines labelled C), where 10 mice were observed for each (n=10).

[0068] FIG. 29B is a graph showing the percentage of mouse survival over time after being injected with 5×10⁵ B16F10 melanoma tumor cells for mice who were administered 1×10⁶ mCherry transduced pmel T cells and PBS (leftmost, solid line), 1×10⁶ mCherry transduced pmel T cells and 10 μg of soluble gp100 (middle, solid line), or 1×10⁶ mCherry transduced pmel T cells and 10 μg of amphiphilic gp100 (rightmost, solid line), where 10 mice were observed for each group (n=10).

[0069] FIG. 29C is a graph showing the percentage of survival in mice over time after treatment with 1×10⁶ T cells spinoculated with viral supernatant collected from mCherry transfected Phoenix-ECO cells (solid lines labelled A), 1×10⁶ T cells and soluble gp100 (solid lines labelled B), or 1×10⁶ T cells and amphiphilic gp100 (solid lines labelled C), where 10 mice were observed for each (n=10).

[0070] FIG. 30 is a graph showing the number of Thy1.1+ and CD8+ T cells in mice that were administered PBS (leftmost circles), 10 μg of soluble gp100 (middle, circles), 10 μg of amphiphilic gp100 (rightmost, circles), 1×10⁵ pmel T cells (leftmost, squares), 1×10⁵ pmel T cells and 10 μg of soluble gp100 (middle, squares), 1×10⁵ pmel T cells and 10 μg of amphiphilic gp100 (rightmost, squares), 1×10⁶ pmel T cells (leftmost, triangles), 1×10⁶ pmel T cells and 10 μg of soluble gp100 (middle, triangles), or 1×10⁶ pmel T cells and 10 μg of amphiphilic gp100 (leftmost, triangles), where red blood cells were collected from 5 mice for each group (n=5).

[0071] FIG. 31 is a graph showing the number of Thy1.1+ T cells in mice that were administered PBS (leftmost circles), 10 μg of soluble gp100 (middle, circles), 10 μg of amphiphilic gp100 (rightmost, circles), 1×10⁵ pmel T cells (leftmost, squares), 1×10⁵ pmel T cells and 10 μg of soluble gp100 (middle, squares), 1×10⁵ pmel T cells and 10 μg of amphiphilic gp100 (rightmost, squares), 1×10⁶ pmel T cells (leftmost, triangles), 1×10⁶ pmel T cells and 10 μg of soluble gp100 (middle, triangles), or 1×10⁶ pmel T cells and 10 μg of amphiphilic gp100 (leftmost, triangles), where red blood cells were collected from 5 mice for each group (n=5).

[0072] FIG. 32A is a graph showing the tumor volume in mice over time after receiving after vaccination with PBS (dotted lines and circles), soluble gp100 (dotted lines and squares), amphiphilic gp100 (dotted lines and triangles), 1×10⁵ pmel T cells (dashed lines and circles), 1×10⁵ T cells and soluble gp100 (dashed lines and squares), 1×10⁵ T cells and amphiphilic gp100 (dashed lines and triangles), 1×10⁶ pmel T cells (solid lines and circles), 1×10⁶ T cells and soluble gp100 (solid lines and squares), 1×10⁶ T cells and amphiphilic gp100 (solid lines and triangles), where 10 mice were observed for each (n=10) and where the mice were treated with whole body irradiation prior to vaccination.

[0073] FIG. 32B is a graph showing the percentage of mouse survival over time after being injected with 5×10⁵ B16F10 melanoma tumor cells for mice who were administered PBS (leftmost, dotted line), 10 μg of soluble gp100 (rightmost, dotted line), 10 μg of amphiphilic gp100 (middle, dotted line), 1×10⁵ pmel T cells (rightmost, dashed line), 1×10⁵ pmel T cells and 10 μg of soluble gp100 (middle, dashed line), 1×10⁵ pmel T cells and 10 μg of amphiphilic gp100 (rightmost, dashed line), 1×10⁶ pmel T cells (leftmost, solid line), 1×10⁶ pmel T cells and 10 μg of soluble gp100 (leftmost, solid line), or 1×10⁶ pmel T cells and 10 μg of amphiphilic gp100 (rightmost, solid line), where 10 mice were observed for each group (n=10) and where the mice were treated with whole body irradiation prior to vaccination.

[0074] FIG. 32C is a graph showing the percentage mouse body weight change over time after receiving vaccination with PBS (dotted lines and circles), soluble gp100 (dotted lines and squares), amphiphilic gp100 (dotted lines and triangles), 1×10⁵ pmel T cells (dashed lines and circles), 1×10⁵T cells and soluble gp100 (dashed lines and squares), 1×10⁵ T cells and amphiphilic gp100 (dashed lines and triangles), 1×10⁶ pmel T cells (solid lines and circles), 1×10⁶T cells and soluble gp100 (solid lines and squares), 1×10⁶ T cells and amphiphilic gp100 (solid lines and triangles), where 10 mice were observed for each (n=10) and where the mice were treated with whole body irradiation prior to vaccination.

[0075] FIG. 33A is a graph showing the percentage of mouse survival over time after being injected with 5×10⁵ B16F10 melanoma tumor cells on D-10 followed by DO administration of 5×10⁶ mCherry transduced pmel T cells and a PBS subcutaneous vaccination regimen (leftmost, solid line), 5×10⁶ mCherry transduced pmel T cells and 10 μg of a soluble gp100/soluble CpG subcutaneous vaccination regimen (middle, solid line), or 5×10⁶ mCherry transduced pmel T cells and 10 μg of a amphiphilic gp100/amphiphilic CpG subcutaneous vaccination regimen (rightmost, solid line), where 10 mice (n=10), 20 mice (n=20), and 24 mice (n=24) were observed for each respective group.

[0076] FIG. 33B is a series of graphs showing tumor volume in mice over time after being injected with 5×10⁵ B16F10 melanoma tumor cells on D-10 followed by DO administration of 5×10⁶ mCherry transduced pmel T cells and a PBS subcutaneous vaccination regimen (leftmost graph), 5×10⁶ mCherry transduced pmel T cells and 10 μg of a soluble gp100/soluble CpG subcutaneous vaccination regimen (middle graph), or 5×10⁶ mCherry transduced pmel T cells and 10 μg of an amphiphilic gp100/amphiphilic CpG subcutaneous vaccination regimen (rightmost graph), where 10 mice (n=10), 20 mice (n=20), and 24 mice (n=24) were observed for each respective group.

[0077] FIG. 34A is a graph showing the number of mCherry transduced pmel T cells in the peripheral blood cells of mice 5 days following administration of T cells and a PBS vaccination regimen following a 10 day 5×10⁵ B16F10 melanoma tumor implantation (leftmost, circles), 5 days following administration of T cells and a 10 μg amphiphilic gp100/amphiphilic CpG vaccination regimen following a 10 day 5×10⁵ B16F10 melanoma tumor implantation (middle, circles), or 75 days following administration of T cells and a 10 μg amphiphilic gp100/amphiphilic CpG vaccination regimen following a 10 day 5×10⁵ B16F10 melanoma tumor implantation (rightmost, circles).

[0078] FIG. 34B is a graph showing the tumor volume in untreated mice challenged with a 5×10⁵ dose of B16F10 melanoma tumor cells as a control for secondary tumor rechallenge on day 75 post initial adoptive T cell transfer.

[0079] FIG. 34C is a graph showing the tumor volume in mice which had previously rejected tumor following adoptive T cell transfer were challenged with a second 5×10⁵ dose of B16F10 melanoma tumor cells on day 75 post initial adoptive T cell transfer with 5×10⁶ mCherry transduced pmel T cells and 10 μg of amphiphilic gp100/amphiphilic CpG vaccination regimen where doses of vaccine were given two times a week for two weeks via subcutaneous tail base injection on days 3, 7, 10, and 14. 7 mice were observed for this group (n=7).

[0080] FIG. 34D is a graph showing the percentage survival of mice which had previously rejected tumor following adoptive T cell transfer were challenged with a second 5×10⁵ dose of B16F10 melanoma tumor cells on day 75 post initial adoptive T cell transfer with 5×10⁶ mCherry transduced pmel T cells and 10 μg of amphiphilic gp100/amphiphilic CpG vaccination regimen where doses of vaccine were given two times a week for two weeks via subcutaneous tail base injection on days 3, 7, 10, and 14 (top line) in comparison to a tumor naïve control group (bottom line), where 7 or 10 mice were observed for each group (n=7 or 10).

[0081] FIG. 35A is a graph showing the number of pmel T cells in the peripheral blood cells of B16F10 tumor bearing mice 5 days after T cell injection who were administered on day −1 subcutaneously PBS (leftmost circles), 10 μg soluble gp100 peptide/soluble CpG (middle circles), or 10 μg of amphiphilic gp100 peptide/amphiphilic CpG (rightmost circles) in addition to, on day 0, 5×10⁶ mCherry transduced T cells previously isolated from splenocytes of 6-8 week old pmel-1 mice, and who were administered a subsequent booster dose of vaccine given via subcutaneous tail base injection on day 3.

[0082] FIG. 35B is a graph showing the number of pmel T cells in the lymph nodes of B16F10 tumor bearing mice 7 days after T cell injection who were administered on day −1 subcutaneously PBS (leftmost circles), 10 μg soluble gp100 peptide/soluble CpG (middle circles), or 10 μg of amphiphilic gp100 peptide/amphiphilic CpG (rightmost circles) in addition to, on day 0, 5×10⁶ mCherry transduced T cells previously isolated from splenocytes of 6-8 week old pmel-1 mice, and who were administered a subsequent booster dose of vaccine given via subcutaneous tail base injection on day 3.

[0083] FIG. 35C a graph showing the number of pmel T cells in the tumor cells of mice 5 days after T cell injection who were administered on day −1 subcutaneously PBS (leftmost circles), 10 μg soluble gp100 peptide/soluble CpG (middle circles), or 10 μg of amphiphilic gp100 peptide/amphiphilic CpG (rightmost circles) in addition to, on day 0, 5×10⁶ T cells previously isolated from splenocytes of 6-8 week old pmel-1 mice, and who were administered a subsequent booster dose of vaccine given via subcutaneous tail base injection on day 3.

[0084] FIG. 36A is a graph showing the number of dendritic cells in the lymph nodes of B16F10 tumor bearing mice 7 days after T cell injection who were administered on day −1 subcutaneously PBS (leftmost circles), 10 μg soluble gp100 peptide/soluble CpG (middle circles), or 10 μg of amphiphilic gp100 peptide/amphiphilic CpG (rightmost circles) in addition to, on day 0, 5×10⁶ mCherry transduced T cells previously isolated from splenocytes of 6-8 week old pmel-1 mice, and who were administered a subsequent booster dose of vaccine given via subcutaneous tail base injection on day 3.

[0085] FIG. 36B is a graph showing the number of CD40 positive dendritic cells in the lymph nodes of B16F10 tumor bearing mice 7 days after T cell injection who were administered on day −1 subcutaneously PBS (leftmost circles), 10 μg soluble gp100 peptide/soluble CpG (middle circles), or 10 μg of amphiphilic gp100 peptide/amphiphilic CpG (rightmost circles) in addition to, on day 0, 5×10⁶ mCherry transduced T cells previously isolated from splenocytes of 6-8 week old pmel-1 mice, and who were administered a subsequent booster dose of vaccine given via subcutaneous tail base injection on day 3.

[0086] FIG. 36C is a graph showing the number of MHCII positive dendritic cells in the lymph nodes of B16F10 tumor bearing mice 7 days after T cell injection who were administered on day −1 subcutaneously PBS (leftmost circles), 10 μg soluble gp100 peptide/soluble CpG (middle circles), or 10 μg of amphiphilic gp100 peptide/amphiphilic CpG (rightmost circles) in addition to, on day 0, 5×10⁶ mCherry transduced T cells previously isolated from splenocytes of 6-8 week old pmel-1 mice, and who were administered a subsequent booster dose of vaccine given via subcutaneous tail base injection on day 3.

[0087] FIG. 36D is a graph showing the number of dendritic cells in the lymph nodes of B16F10 tumor bearing mice that were CD80 positive and CD86 negative (bottom of each column), CD80 negative and CD86 positive (middle of each column), and CD80 positive and CD86 positive (top of each column), 7 days after being administered a T cell injection on day −1 subcutaneously PBS, 10 μg soluble gp100 peptide/soluble CpG, or 10 μg of amphiphilic gp100 peptide/amphiphilic CpG, in addition to, on day 0, 5×10⁶ mCherry transduced T cells previously isolated from splenocytes of 6-8 week old pmel-1 mice, and after being administered a subsequent booster dose of vaccine given via subcutaneous tail base injection on day 3.

[0088] FIG. 37 is an image of the 561 gene immunology nanostring panel showing the RNA sequencing analysis from the lymph nodes of mice harvested on day 1 after being administered on day −1 subcutaneously 10 μg soluble gp100 peptide/soluble CpG alone, 10 μg of amphiphilic gp100 peptide/amphiphilic CpG alone, 5×10⁶ mCherry transduced T cells previously isolated from splenocytes of 6-8 week old pmel-1 mice on day 0, 5×10⁶ mCherry transduced T cells on day 0 and 10 μg soluble gp100/soluble CpG on day −1, or 5×10⁶ mCherry transduced T cells on day 0 and 10 μg of amphiphilic gp100 peptide/amphiphilic CpG on day −1.

[0089] FIG. 38A is a graph showing the number of CD25+ and CD8+ T cells per mg of tumor that were found in the tumors of B16F10 tumor bearing mice 7 days after they were administered 5×10⁶ mCherry transduced pmel T cells previously isolated from splenocytes of 6-8 week old pmel-1 mice combined with a day −1 and day 3 PBS subcutaneous vaccination (leftmost circles), day −1 and day 3 10 μg soluble gp100 peptide/soluble CpG vaccination (middle circles), or day −1 and day 3 10 μg amphiphilic gp100 peptide/amphiphilic CpG vaccination (rightmost circles).

[0090] FIG. 38B is a graph showing the number of Ki67+ and CD8+ T cells per mg of tumor that were found in the tumors of B16F10 tumor bearing mice 7 days after they were administered 5×10⁶ mCherry transduced pmel T cells previously isolated from splenocytes of 6-8 week old pmel-1 mice combined with a day −1 and day 3 PBS subcutaneous vaccination (leftmost circles), day −1 and day 3 10 μg soluble gp100 peptide/soluble CpG vaccination (middle circles), or day −1 and day 3 10 μg amphiphilic gp100 peptide/amphiphilic CpG vaccination (rightmost circles).

[0091] FIG. 38C is a graph showing the number of CD8 T cells per mg of tumor that were found in the tumors of B16F10 tumor bearing mice that were IFNγ+(bottom of each column), TNFα⁺ (middle of each column), or IFNγ+ and TNFα⁺ (top of each column) 7 days after they were administered 5×10⁶ mCherry transduced pmel T cells previously isolated from splenocytes of 6-8 week old pmel-1 mice combined with a day −1 and day 3 PBS subcutaneous vaccination (leftmost bar), day −1 and day 3 10 μg soluble gp100 peptide/soluble CpG vaccination (middle bar), or day −1 and day 3 10 μg amphiphilic gp100 peptide/amphiphilic CpG vaccination (rightmost bar).

[0092] FIG. 39 is an image of the 561 gene immunology nanostring panel showing the RNA sequencing analysis from the B16F10 tumors of mice on day 7 after DO administration of 5×10⁶ mCherry transduced pmel T cells previously isolated from splenocytes of 6-8 week old pmel-1 mice, or after DO administration of 5×10⁶ mCherry transduced pmel T cells following combination with D-1 subcutaneous vaccination with 10 μg amphiphilic gp100 peptide/amphiphilic CpG.

[0093] FIG. 40A is a graph showing the number of TRP1 specific CD8 T cells per mg of tumor that were found in the tumors of B16F10 tumor bearing mice that were IFNγ⁺ (bottom of each column), TNFα⁺ (middle of each column), or IFNγ⁺ and TNFα⁺ (top of each column), 7 days after they were administered 5×10⁶ mCherry transduced pmel T cells previously isolated from splenocytes of 6-8 week old pmel-1 mice combined with a day −1 and day 3 PBS subcutaneous vaccination (leftmost bar), day −1 and day 3 10 μg soluble gp100 peptide/soluble CpG vaccination (middle bar), or day −1 and day 3 10 μg amphiphilic gp100 peptide/amphiphilic CpG vaccination (rightmost bar).

[0094] FIG. 40B is a graph showing the number of TRP2 specific CD8 T cells per mg of tumor that were found in the tumors of mice that were IFNγ⁺ (bottom of each column), TNFα⁺ (middle of each column), or IFNγ⁺ and TNFα⁺ (top of each column), 7 days after they were administered 5×10⁶ mCherry transduced pmel T cells previously isolated from splenocytes of 6-8 week old pmel-1 mice combined with a day −1 and day 3 PBS subcutaneous vaccination (leftmost bar), day −1 and day 3 10 μg soluble gp100 peptide/soluble CpG vaccination (middle bar), or day −1 and day 3 10 μg amphiphilic gp100 peptide/amphiphilic CpG vaccination (rightmost bar).

[0095] FIG. 40C is a graph showing the number of B16 TAA specific CD8 T cells per mg of tumor that were found in the tumors of mice that were IFNγ+(bottom of each column), TNFα⁺ (middle of each column), or IFNγ⁺ and TNFα⁺ (top of each column), 7 days after they were administered 5×10⁶ mCherry transduced pmel T cells previously isolated from splenocytes of 6-8 week old pmel-1 mice combined with a day −1 and day 3 PBS subcutaneous vaccination (leftmost bar), day −1 and day 3 10 μg soluble gp100 peptide/soluble CpG vaccination (middle bar), or day −1 and day 3 10 μg amphiphilic gp100 peptide/amphiphilic CpG vaccination (rightmost bar).

[0096] FIG. 41 is a graph showing the number of mCherry transduced pmel T cells, generated from previously isolated splenocytes of 6-8 week old pmel-1 mice, over time following activation by a 1:1 24 hour culture with a lymph node homogenate from mice which were euthanized 48 hours after being administered subcutaneous vaccination with PBS (second from bottom circles), 10 μg soluble gp100 (second from top circles), or 10 μg amphiphilic gp100 (top circles). mCherry transduced pmel T cells that were not cultured with lymph node homogenate were used as a control (bottom circles).

[0097] FIG. 42 is a graph showing the percent lysis of tumor cells at various effector-to-target (E:T) ratios of mCherry transduced pmel T cells, generated from previously isolated splenocytes of 6-8 week old pmel-1 mice, activated for 24 hours at a 1:1 ratio with lymph node homogenate generated from mice subcutaneously vaccinated 48 hours prior with PBS (second from the bottom circles), 10 μg soluble gp100 (second from the top circles), or 10 μg amphiphilic gp100 (top circles). mCherry transduced pmel T cells that were not cultured with lymph node homogenate were used as a control (bottom circles).

[0098] FIG. 43A is a graph showing the amount of IFNγ produced in supernatant liquid of mCherry transduced pmel T cells, generated from previously isolated splenocytes of 6-8 week old pmel-1 mice, 1 Day following activation by a 24 hour, 1:1 culture with a lymph node homogenate from mice which were euthanized 48 hours after being administered subcutaneous vaccination with PBS (middle-left circles), 10 μg soluble gp100 (middle-right circles), or 10 μg amphiphilic gp100 (rightmost circles). mCherry transduced pmel T cells that were not cultured with lymph node homogenate were used as a control (leftmost circles).

[0099] FIG. 43B is a graph showing the amount of IFNγ produced in supernatant liquid of mCherry transduced pmel T cells, generated from previously isolated splenocytes of 6-8 week old pmel-1 mice, 7 Days following activation by a 24 hour, 1:1 culture with a lymph node homogenate from mice which were euthanized 48 hours after being administered subcutaneous vaccination with PBS (middle-left circles), 10 μg soluble gp100 (middle-right circles), or 10 μg amphiphilic gp100 (rightmost circles). mCherry transduced pmel T cells that were not cultured with lymph node homogenate were used as a control (leftmost circles).

[0100] FIG. 44 is a graph showing the number of CD25+ T cells (bottom of each column), CD69+ T cells (middle of each column), and CD25+ and CD69+ T cells (top of each column) that were found from co-culture of mCherry transduced pmel T cells, generated from previously isolated splenocytes of 6-8 week old pmel-1 mice, following activation by a 24 hour, 1:1 culture with a lymph node homogenate from mice which were euthanized 48 hours after being administered subcutaneous vaccination with PBS, 10 μg soluble gp100, or 10 μg amphiphilic gp100. mCherry transduced pmel T cells that were not cultured with lymph node homogenate were used as a control.

[0101] FIG. 45 is a graph showing the number of CD25+ T cells (bottom of each column), CD69+ T cells (middle of each column), and CD25+ and CD69+ T cells (top of each column) that were found either 1 day or 4 days following 2:1 co-culture of human T cells retrovirally transduced to express a KRAS G1 2D specific TCR (TCR701) with mature autologous dendritic cells that were previously labeled overnight for 18 hours with PBS, or amphiphilic KRAS G1 2D peptide. T cells isolated from human peripheral blood mononuclear cells were spinoculated with viral supernatant collected from Phoenix-Ampho cells transfected with the TCR 701 KRAS G12D specific TCR T Cell construct or an mCherry control construct to generate KRAS specific TCR T cells and rested for 5 days prior to culture.

[0102] FIG. 46A is a graph showing the amount of IFNγ secreted from cell cultures following 2:1 co-culture of human T cells retrovirally transduced to express a KRAS G12D specific TCR (TCR701) alone (left bars) or with mature autologous dendritic cells that were previously labeled overnight for 18 hours with PBS (middle bars), or amphiphilic KRAS G1 2D peptide (right bars). T cells isolated from human peripheral blood mononuclear cells were spinoculated with viral supernatant collected from Phoenix-Ampho cells transfected with the TCR 701 KRAS G1 2D specific TCR T Cell construct or an mCherry control construct to generate KRAS specific TCR T cells and rested for 5 days prior to culture.

[0103] FIG. 46B is a graph showing the amount of IL-2 secreted from cell cultures following 2:1 co-culture of human T cells retrovirally transduced to express a KRAS G12D specific TCR (TCR701) alone (left bars) or with mature autologous dendritic cells that were previously labeled overnight for 18 hours with PBS (middle bars), or amphiphilic KRAS G1 2D peptide (right bars). T cells isolated from human peripheral blood mononuclear cells were spinoculated with viral supernatant collected from Phoenix-Ampho cells transfected with the TCR 701 KRAS G1 2D specific TCR T Cell construct or an mCherry control construct to generate KRAS specific TCR T cells and rested for 5 days prior to culture.

[0104] FIG. 46C is a graph showing the amount of TNFα secreted from cell cultures following 2:1 co-culture of human T cells retrovirally transduced to express a KRAS G12D specific TCR (TCR701) alone (left bars) or with mature autologous dendritic cells that were previously labeled overnight for 18 hours with PBS (middle bars), or amphiphilic KRAS G1 2D peptide (right bars). T cells isolated from human peripheral blood mononuclear cells were spinoculated with viral supernatant collected from Phoenix-Ampho cells transfected with the TCR 701 KRAS G1 2D specific TCR T Cell construct or an mCherry control construct to generate KRAS specific TCR T cells and rested for 5 days prior to culture.

[0105] FIG. 47A is a graph showing the percent lysis of Cos-7 target cells expressing luciferase gene, HLA A*11:01, and the KRAS G12D mutation at various effector to target ratios after culture with a KRAS G12D specific TCR (TCR701) alone (bottom circles) or following overnight 2:1 culture with mature autologous dendritic cells that were previously labeled overnight for 18 hours with PBS (middle circles), or amphiphilic KRAS G12D peptide (top circles). T cells isolated from human peripheral blood mononuclear cells were spinoculated with viral supernatant collected from Phoenix-Ampho cells transfected with the TCR 701 KRAS G12D specific TCR T Cell construct or an mCherry control construct to generate KRAS specific TCR T cells and rested for 5 days prior to culture.

[0106] FIG. 47B is a graph showing the percent lysis of Panc-1 human derived tumor line that also expresses a luciferase gene, HLA A*11:01, and the KRAS G12D mutation at various effector to target ratios after culture with a KRAS G12D specific TCR (TCR701) alone (bottom circles) or following overnight 2:1 culture with mature autologous dendritic cells that were previously labeled overnight for 18 hours with PBS (middle circles), or amphiphilic KRAS G12D peptide (top circles). T cells isolated from human peripheral blood mononuclear cells were spinoculated with viral supernatant collected from Phoenix-Ampho cells transfected with the TCR 701 KRAS G12D specific TCR T Cell construct or an mCherry control construct to generate KRAS specific TCR T cells and rested for 5 days prior to culture.

[0107] FIG. 48A is a graph showing the fold change of IFNγ secreted from cell cultures following 2:1 co-culture of human T cells retrovirally transduced to express a KRAS G12D specific TCR (TCR701) with mature autologous dendritic cells that were previously labeled overnight for 18 hours with freshly made soluble or amphiphilic KRAS G12D peptide (left circles), soluble KRAS G12D peptide that had been prepared 24 hours prior to labeling of dendritic cells in human serum and incubated at 37 degrees overnight to mimic in vivo conditions (bottom two lines and circles), or amphiphilic KRAS G12D peptide that had been prepared 24 hours prior to labeling of dendritic cells in human serum and incubated at 37 degrees overnight to mimic in vivo conditions (top two lines and circles). T cells isolated from human peripheral blood mononuclear cells were spinoculated with viral supernatant collected from Phoenix-Ampho cells transfected with the TCR 701 KRAS G1 2D specific TCR T Cell construct or an mCherry control construct to generate KRAS specific TCR T cells and rested for 5 days prior to culture.

[0108] FIG. 48B is a graph showing the fold change in TNFα secreted from cell cultures following 2:1 co-culture of human T cells retrovirally transduced to express a KRAS G12D specific TCR (TCR701) with mature autologous dendritic cells that were previously labeled overnight for 18 hours with freshly made soluble or amphiphilic KRAS G12D peptide (left circles), soluble KRAS G12D peptide that had been prepared 24 hours prior to labeling of dendritic cells in human serum and incubated at 37 degrees overnight to mimic in vivo conditions (bottom two lines and circles), or amphiphilic KRAS G12D peptide that had been prepared 24 hours prior to labeling of dendritic cells in human serum and incubated at 37 degrees overnight to mimic in vivo conditions (top two lines and circles). T cells isolated from human peripheral blood mononuclear cells were spinoculated with viral supernatant collected from Phoenix-Ampho cells transfected with the TCR 701 KRAS G1 2D specific TCR T Cell construct or an mCherry control construct to generate KRAS specific TCR T cells and rested for 5 days prior to culture.

[0109] FIG. 48C is a graph showing the fold change in IL2 secreted from cell cultures following 2:1 co-culture of human T cells retrovirally transduced to express a KRAS G12D specific TCR (TCR701) with mature autologous dendritic cells that were previously labeled overnight for 18 hours with freshly made soluble or amphiphilic KRAS G12D peptide (left circles), soluble KRAS G12D peptide that had been prepared 24 hours prior to labeling of dendritic cells in human serum and incubated at 37 degrees overnight to mimic in vivo conditions (bottom two lines and circles), or amphiphilic KRAS G12D peptide that had been prepared 24 hours prior to labeling of dendritic cells in human serum and incubated at 37 degrees overnight to mimic in vivo conditions (top two lines and circles). T cells isolated from human peripheral blood mononuclear cells were spinoculated with viral supernatant collected from Phoenix-Ampho cells transfected with the TCR 701 KRAS G1 2D specific TCR T Cell construct or an mCherry control construct to generate KRAS specific TCR T cells and rested for 5 days prior to culture.

[0110] FIG. 48D is a graph showing the percent change of CD69+ and CD25+ T cells in cell cultures following 2:1 co-culture of human T cells retrovirally transduced to express a KRAS G12D specific TCR (TCR701) with mature autologous dendritic cells that were previously labeled overnight for 18 hours with soluble KRAS G12D peptide that had been prepared 24 hours prior to labeling of dendritic cells in human serum and incubated at 37 degrees overnight to mimic in vivo conditions in comparison to freshly made soluble KRAS G12D peptide (left bar), or amphiphilic KRAS G12D peptide that had been prepared 24 hours prior to labeling of dendritic cells in human serum and incubated at 37 degrees overnight to mimic in vivo conditions compared to freshly prepared amphiphilic KRAS G12D peptide (right bar). T cells isolated from human peripheral blood mononuclear cells were spinoculated with viral supernatant collected from Phoenix-Ampho cells transfected with the TCR 701 KRAS G12D specific TCR T Cell construct or an mCherry control construct to generate KRAS specific TCR T cells and rested for 5 days prior to culture.

[0111] FIG. 48E is a graph showing the fold change in specific lysis of cell cultures following 2:1 co-culture of human T cells retrovirally transduced to express a KRAS G12D specific TCR (TCR701) with mature autologous dendritic cells that were previously labeled overnight for 18 hours with freshly made soluble or amphiphilic KRAS G12D peptide (left circles), soluble KRAS G12D peptide that had been prepared 24 hours prior to labeling of dendritic cells in human serum and incubated at 37 degrees overnight to mimic in vivo conditions (bottom two lines and circles), or amphiphilic KRAS G12D peptide that had been prepared 24 hours prior to labeling of dendritic cells in human serum and incubated at 37 degrees overnight to mimic in vivo conditions (top two lines and circles). T cells isolated from human peripheral blood mononuclear cells were spinoculated with viral supernatant collected from Phoenix-Ampho cells transfected with the TCR 701 KRAS G12D specific TCR T Cell construct or an mCherry control construct to generate KRAS specific TCR T cells and rested for 5 days prior to culture.

[0112] FIG. 49A is a graph showing the number of transduced T cells in the peripheral blood cells of tumor naïve mice that were administered a 5×10⁵ dose of B16F10 melanoma tumor cells after previously being administered an intraperitoneal injection of an anti-thy1.1 antibody one week prior (leftmost circles), mice that were administered a 5×10⁵ dose of B16F10 melanoma tumor cells 68 day prior (middle circles), and mice that were administered a second 5×10⁵ dose of B16F10 melanoma tumor cells on day 75 post initial adoptive transfer and had been administered an intraperitoneal injection of an anti-thy1.1 antibody one week prior (rightmost circles).

[0113] FIG. 49B is a graph showing the percentage survival of mice which had previously rejected tumor following adoptive T cell transfer and were challenged with a second 5×10⁵ dose of B16F10 melanoma tumor cells on day 75 post initial adoptive T cell transfer with 5×10⁶ transduced pmel T cells and 10 μg of amphiphilic gp100. Doses of anti-thy1.1 antibody were given by tail base injection on days −7, 6, 13, 20, 27, and 34 (top line; n=3) in comparison to a control group that had not been administered an initial 5×10⁵ dose of B16F10 melanoma tumor cells (bottom line; n=5).

[0114] FIG. 49C is a graph showing the tumor volume in mice which had previously rejected tumor following adoptive T cell transfer and were challenged with a second 5×10⁵ dose of B16F10 melanoma tumor cells on day 75 post initial adoptive T cell transfer with 5×10⁶ transduced pmel T cells and 10 μg of amphiphilic gp100/amphiphilic CpG vaccination regimen. Doses of anti-thy1.1 antibody were given by tail base injection on days −7, 6, 13, 20, 27, and 34.

[0115] FIG. 49D is a graph showing the tumor volume in untreated mice challenged with a 5×10⁵ dose of B16F10 melanoma tumor cells as a control for secondary tumor rechallenge on day 75 post initial adoptive T cell transfer.

[0116] FIG. 50A is a graph showing the number of mCherry+ CD3+ T cells isolated from the peripheral blood of C57BL/6 HLA A1101 mice 16 days after they were administered PBS, or a soluble or amphiphilic G12D or G12V KRAS peptide on day −1 as well as 3×10⁶ T cells previously isolated from splenocytes of 6-8 week old C57BL/6 HLA A1101 mice and retrovirally transduced with either a G12D KRAS specific TCR construct (TCR6) or a G12V KRAS specific TCR construct (TCR3) on day 0. The mice were also administered a subsequent booster dose of vaccine on days 3, 7, 10 and 14.

[0117] FIG. 50B is a graph showing the number of mCherry+CD3+ T cells that were CD25+(bottom of each column), CD69+(middle of each column), and CD25+ and CD69+(top of each column) that were isolated from the peripheral blood of C57BL/6 HLA A1101 mice 16 days after they were administered PBS, or a soluble or amphiphilic G12D or G12V KRAS peptide on day −1 as well as 3×10⁶ T cells previously isolated from splenocytes of 6-8 week old C57BL/6 HLA A1101 mice and retrovirally transduced with either a G12D KRAS specific TCR construct (TCR6) or a G12V KRAS specific TCR construct (TCR3) on day 0. The mice were also administered a subsequent booster dose of vaccine on days 3, 7, 10 and 14.

[0118] FIG. 51A is a graph showing the number of spot forming cells (SFC) per 1×10⁶ splenocytes in C57BL/6 HLA A1101 mice 16 days after they were administered PBS, or a soluble or amphiphilic G12D KRAS peptide on day −1 as well as 3×10⁶ T cells previously isolated from splenocytes of 6-8 week old C57BL/6 HLA A1101 mice and retrovirally transduced with a G12D KRAS specific TCR construct (TCR6) on day 0. The mice were also administered a subsequent booster dose of vaccine on days 3, 7, 10 and 14.

[0119] FIG. 51B is a graph showing the number of SFC per 1×10⁶ splenocytes splenocytes in C57BL/6 HLA A1101 mice 16 days after they were administered PBS, or a soluble or amphiphilic G12V KRAS peptide on day −1 as well as 3×10⁶ T cells previously isolated from splenocytes of 6-8 week old C57BL/6 HLA A1101 mice and retrovirally transduced with a G12V KRAS specific TCR construct (TCR3) on day 0. The mice were also administered a subsequent booster dose of vaccine on days 3, 7, 10 and 14.

[0120] FIG. 52 is a graph showing the number of dendritic cells (DCs) isolated from the lymph nodes of C57BL/6 HLA A1101 mice 16 days after they were administered PBS, or a soluble or amphiphilic G12D or G12V KRAS peptide on day −1 as well as 3×10⁶ T cells previously isolated from splenocytes of 6-8 week old C57BL/6 HLA A1101 mice and retrovirally transduced with either a G12D KRAS specific TCR construct (TCR6) or a G12V KRAS specific TCR construct (TCR3) on day 0. The mice were also administered a subsequent booster dose of vaccine on days 3, 7, 10 and 14.

[0121] FIG. 53A is a graph showing the number of MHCII positive DCs isolated from the lymph nodes of C57BL/6 HLA A1101 mice 16 days after they were administered PBS, or a soluble or amphiphilic G12D or G12V KRAS peptide on day −1 as well as 3×10⁶ T cells previously isolated from splenocytes of 6-8 week old C57BL/6 HLA A1101 mice and retrovirally transduced with either a G12D KRAS specific TCR construct (TCR6) or a G12V KRAS specific TCR construct (TCR3) on day 0. The mice were also administered a subsequent booster dose of vaccine on days 3, 7, 10 and 14.

[0122] FIG. 53B is a graph showing the number of CD40 positive DCs isolated from the lymph nodes of C57BL/6 HLA A1101 mice 16 days after they were administered PBS, or a soluble or amphiphilic G12D or G12V KRAS peptide on day −1 as well as 3×10⁶ T cells previously isolated from splenocytes of 6-8 week old C57BL/6 HLA A1101 mice and retrovirally transduced with either a G12D KRAS specific TCR construct (TCR6) or a G12V KRAS specific TCR construct (TCR3) on day 0. The mice were also administered a subsequent booster dose of vaccine on days 3, 7, 10 and 14.

[0123] FIG. 53C is a graph showing the number of DCs isolated from the lymph nodes of mice that were CD80+ and CD86− T cells (bottom of each column), CD80− and CD86+ T cells (middle of each column), and CD80+ and CD86+ T cells (top of each column) that were found in C57BL/6 HLA A1101 mice 16 days after they were administered PBS, or a soluble or amphiphilic G12D or G12V KRAS peptide on day −1 as well as 3×10⁶ T cells previously isolated from splenocytes of 6-8 week old C57BL/6 HLA A1101 mice and retrovirally transduced with either a G12D KRAS specific TCR construct (TCR6) or a G12V KRAS specific TCR construct (TCR3) on day 0. The mice were also administered a subsequent booster dose of vaccine on days 3, 7, 10 and 14.

[0124] FIG. 54A is a graph showing the number of mCherry+CD3+ T cells isolated from the lymph nodes of C57BL/6 HLA A1101 mice 16 days after they were administered PBS, or a soluble or amphiphilic G12D or G12V KRAS peptide on day −1 as well as 3×10⁶ T cells previously isolated from splenocytes of 6-8 week old C57BL/6 HLA A1101 mice and retrovirally transduced with either a G1 2D KRAS specific TCR construct (TCR6) or a G12V KRAS specific TCR construct (TCR3) on day 0. The mice were also administered a subsequent booster dose of vaccine on days 3, 7, 10 and 14.

[0125] FIG. 54B is a graph showing the number of mCherry+CD3+ T cells isolated from the lymph nodes of mice that were CD25+(bottom of each column), CD69+(middle of each column), and CD25+ and CD69+(top of each column) 16 days after they were administered PBS, or a soluble or amphiphilic G12D or G12V KRAS peptide on day −1 as well as 3×10⁶ T cells previously isolated from splenocytes of 6-8 week old C57BL/6 HLA A1101 mice and retrovirally transduced with either a G12D KRAS specific TCR construct (TCR6) or a G12V KRAS specific TCR construct (TCR3) on day 0. The mice were also administered a subsequent booster dose of vaccine on days 3, 7, 10 and 14.

[0126] FIG. 55 is a graph showing the number of DCs isolated from the lungs of C57BL/6 HLA A1101 mice 16 days after they were administered PBS, or a soluble or amphiphilic G12D or G12V KRAS peptide on day −1 as well as 3×10⁶ T cells previously isolated from splenocytes of 6-8 week old C57BL/6 HLA A1101 mice and retrovirally transduced with either a G12D KRAS specific TCR construct (TCR6) or a G12V KRAS specific TCR construct (TCR3) on day 0. The mice were also administered a subsequent booster dose of vaccine on days 3, 7, 10 and 14.

[0127] FIG. 56A is a graph showing the number of CD40+ DCs isolated from the lungs of C57BL/6 HLA A1101 mice 16 days after they were administered PBS, or a soluble or amphiphilic G12D or G12V KRAS peptide on day −1 as well as 3×10⁶ T cells previously isolated from splenocytes of 6-8 week old C57BL/6 HLA A1101 mice and retrovirally transduced with either a G12D KRAS specific TCR construct (TCR6) or a G12V KRAS specific TCR construct (TCR3) on day 0. The mice were also administered a subsequent booster dose of vaccine on days 3, 7, 10 and 14.

[0128] FIG. 56B is a graph showing the number of MHCII+ DCs isolated from the lungs of C57BL/6 HLA A1101 mice 16 days after they were administered PBS, or a soluble or amphiphilic G12D or G12V KRAS peptide on day −1 as well as 3×10⁶ T cells previously isolated from splenocytes of 6-8 week old C57BL/6 HLA A1101 mice and retrovirally transduced with either a G12D KRAS specific TCR construct (TCR6) or a G12V KRAS specific TCR construct (TCR3) on day 0. The mice were also administered a subsequent booster dose of vaccine on days 3, 7, 10 and 14.

[0129] FIG. 56C is a graph showing the number of DCs isolated from the lungs of mice that were CD80+(bottom of each column), CD86+(middle of each column), and CD80+ and CD86+(top of each column) 16 days after they were administered PBS, or a soluble or amphiphilic G12D or G12V KRAS peptide on day −1 as well as 3×10⁶ T cells previously isolated from splenocytes of 6-8 week old C57BL/6 HLA A1101 mice and retrovirally transduced with either a G12D KRAS specific TCR construct (TCR6) or a G12V KRAS specific TCR construct (TCR3) on day 0. The mice were also administered a subsequent booster dose of vaccine on days 3, 7, 10 and 14.

[0130] FIG. 57 is a graph showing the number of mCherry+CD3+ T cells isolated from the lungs of C57BL/6 HLA A1101 mice 16 days after they were administered PBS, or a soluble or amphiphilic G12D or G12V KRAS peptide on day −1 as well as 3×10⁶ T cells previously isolated from splenocytes of 6-8 week old C57BL/6 HLA A1101 mice and retrovirally transduced with either a G12D KRAS specific TCR construct (TCR6) or a G12V KRAS specific TCR construct (TCR3) on day 0. The mice were also administered a subsequent booster dose of vaccine on days 3, 7, 10 and 14.

[0131] FIG. 58 is a graph showing the number of CD25+ T cells (bottom of each column), CD69+ T cells (middle of each column), and CD25+ and CD69+ T cells (top of each column) that were found either 1 day or 4 days following 2:1 co-culture of human T cells retrovirally transduced to express a HLA C*08:02 Restricted KRAS G12D specific TCR (TCR4095) with mature autologous dendritic cells that were previously labeled overnight for 18 hours with PBS, or amphiphilic KRAS G12D peptide. T cells isolated from human peripheral blood mononuclear cells were spinoculated with viral supernatant collected from Phoenix-Ampho cells transfected with the TCR 4095 KRAS G12D specific TCR T Cell construct or an mCherry control construct to generate KRAS specific TCR T cells and rested for 5 days prior to culture.

[0132] FIG. 59 is a graph showing the number of CD25+ T cells (bottom of each column), CD69+ T cells (middle of each column), and CD25+ and CD69+ T cells (top of each column) that were found either 1 day or 4 days following 2:1 co-culture of human T cells retrovirally transduced to express a HLA A*11:01 restricted KRAS G12V specific TCR (TCR700) with mature autologous dendritic cells that were previously labeled overnight for 18 hours with PBS, or amphiphilic KRAS G12V peptide. T cells isolated from human peripheral blood mononuclear cells were spinoculated with viral supernatant collected from Phoenix-Ampho cells transfected with the TCR 700 KRAS G1 2V specific TCR T Cell construct or an mCherry control construct to generate KRAS specific TCR T cells and rested for 5 days prior to culture.

[0133] FIG. 60A is a graph showing the amount of IFNγ secreted from cell cultures following 2:1 co-culture of human T cells retrovirally transduced to express a HLA A*11:01 restricted KRAS G12V specific TCR (TCR700) alone (left bars) or with mature autologous dendritic cells that were previously labeled overnight for 18 hours with PBS (middle bars), or amphiphilic KRAS G1 2V peptide (right bars). T cells isolated from human peripheral blood mononuclear cells were spinoculated with viral supernatant collected from Phoenix-Ampho cells transfected with the TCR 700 KRAS G12V specific TCR T Cell construct or an mCherry control construct to generate KRAS specific TCR T cells and rested for 5 days prior to culture.

[0134] FIG. 60B is a graph showing the amount of IL-2 secreted from cell cultures following 2:1 co-culture of human T cells retrovirally transduced to express a HLA A*11:01 restricted KRAS G12V specific TCR (TCR700) alone (left bars) or with mature autologous dendritic cells that were previously labeled overnight for 18 hours with PBS (middle bars), or amphiphilic KRAS G1 2V peptide (right bars). T cells isolated from human peripheral blood mononuclear cells were spinoculated with viral supernatant collected from Phoenix-Ampho cells transfected with the TCR 700 KRAS G12V specific TCR T Cell construct or an mCherry control construct to generate KRAS specific TCR T cells and rested for 5 days prior to culture.

[0135] FIG. 60C is a graph showing the amount of TNFα secreted from cell cultures following 2:1 co-culture of human T cells retrovirally transduced to express a HLA A*11:01 restricted KRAS G12V specific TCR (TCR700) alone (left bars) or with mature autologous dendritic cells that were previously labeled overnight for 18 hours with PBS (middle bars), or amphiphilic KRAS G1 2V peptide (right bars). T cells isolated from human peripheral blood mononuclear cells were spinoculated with viral supernatant collected from Phoenix-Ampho cells transfected with the TCR 700 KRAS G12V specific TCR T Cell construct or an mCherry control construct to generate KRAS specific TCR T cells and rested for 5 days prior to culture.

[0136] FIG. 61 is a graph showing the percent lysis of Cos-7 target cells expressing luciferase gene, HLA A*11:01, and the KRAS G12V mutation at various effector to target ratios after culture with a KRAS G12V specific TCR (TCR700) alone (bottom circles) or following overnight 2:1 culture with mature autologous dendritic cells that were previously labeled overnight for 18 hours with PBS (middle circles), or amphiphilic KRAS G12V peptide (top circles). T cells isolated from human peripheral blood mononuclear cells were spinoculated with viral supernatant collected from Phoenix-Ampho cells transfected with the TCR 700 KRAS G12V specific TCR T Cell construct or an mCherry control construct to generate KRAS specific TCR T cells and rested for 5 days prior to culture.

[0137] FIG. 62A is a graph showing the fold change in the TCR-T activation from cell cultures following 2:1 co-culture of human T cells retrovirally transduced to express a HLA A*11:01 restricted KRAS G1 2V specific TCR (TCR700) with mature autologous dendritic cells that were previously labeled overnight for 18 hours with freshly made soluble or amphiphilic KRAS G12V peptide (left circles), soluble KRAS G12V peptide that had been prepared 24 hours prior to labeling of dendritic cells in human serum and incubated at 37 degrees overnight to mimic in vivo conditions (bottom line and circle), or amphiphilic KRAS G12V peptide that had been prepared 24 hours prior to labeling of dendritic cells in human serum and incubated at 37 degrees overnight to mimic in vivo conditions (top line and circle). T cells isolated from human peripheral blood mononuclear cells were spinoculated with viral supernatant collected from Phoenix-Ampho cells transfected with the TCR 700 KRAS G1 2V specific TCR T Cell construct or an mCherry control construct to generate KRAS specific TCR T cells and rested for 5 days prior to culture.

[0138] FIG. 62B is a graph showing the fold change in the TCR-T tumor lysis from cell cultures following 2:1 co-culture of human T cells retrovirally transduced to express a HLA A*11:01 restricted KRAS G12V specific TCR (TCR700) with mature autologous dendritic cells that were previously labeled overnight for 18 hours with freshly made soluble or amphiphilic KRAS G12V peptide (left circles), soluble KRAS G12V peptide that had been prepared 24 hours prior to labeling of dendritic cells in human serum and incubated at 37 degrees overnight to mimic in vivo conditions (bottom line and circle), or amphiphilic KRAS G12V peptide that had been prepared 24 hours prior to labeling of dendritic cells in human serum and incubated at 37 degrees overnight to mimic in vivo conditions (top line and circle). T cells isolated from human peripheral blood mononuclear cells were spinoculated with viral supernatant collected from Phoenix-Ampho cells transfected with the TCR 700 KRAS G1 2V specific TCR T Cell construct or an mCherry control construct to generate KRAS specific TCR T cells and rested for 5 days prior to culture.

[0139] FIG. 63 is a graph showing the number of CD25+ T cells (bottom of each column), CD69+ T cells (middle of each column), and CD25+ and CD69+ T cells (top of each column) that were found either 2 days or 5 days following 2:1 co-culture of human T cells retrovirally transduced to express a HLA A*02:01 restricted E7 specific TCR (TCR1 G4) with mature autologous dendritic cells that were previously labeled overnight for 18 hours with PBS, or amphiphilic E7 peptide. T cells isolated from human peripheral blood mononuclear cells were spinoculated with viral supernatant collected from Phoenix-Ampho cells transfected with the E7 specific TCR T Cell construct or an mCherry control construct to generate E7 specific TCR T cells and rested for 5 days prior to culture.

[0140] FIG. 64A is a graph showing the amount of IFNγ secreted from cell cultures following 2:1 co-culture of human T cells retrovirally transduced to express a E7 specific TCR (TCR1 G4) alone (left bars) or with mature autologous dendritic cells that were previously labeled overnight for 18 hours with PBS (middle bars), or amphiphilic E7 peptide (right bars). T cells isolated from human peripheral blood mononuclear cells were spinoculated with viral supernatant collected from Phoenix-Ampho cells transfected with the E7 specific TCR T Cell construct or an mCherry control construct to generate E7 specific TCR T cells and rested for 5 days prior to culture.

[0141] FIG. 64B is a graph showing the amount of IL-2 secreted from cell cultures following 2:1 co-culture of human T cells retrovirally transduced to express a E7 specific TCR (TCR1 G4) alone (left bars) or with mature autologous dendritic cells that were previously labeled overnight for 18 hours with PBS (middle bars), or amphiphilic E7 peptide (right bars). T cells isolated from human peripheral blood mononuclear cells were spinoculated with viral supernatant collected from Phoenix-Ampho cells transfected with the E7 specific TCR T Cell construct or an mCherry control construct to generate E7 specific TCR T cells and rested for 5 days prior to culture.

[0142] FIG. 65 is a graph showing the percent lysis of Ca Ski target cells expressing luciferase gene, HLA A*02:01, and the HPV16 E7 epitope at various effector to target ratios after culture with a E7 specific TCR (TCR1 G4) alone (bottom circles) or following overnight 2:1 culture with mature autologous dendritic cells that were previously labeled overnight for 18 hours with PBS (middle circles), or amphiphilic E7 peptide (top circles). T cells isolated from human peripheral blood mononuclear cells were spinoculated with viral supernatant collected from Phoenix-Ampho cells transfected with the E7 specific TCR T Cell construct or an mCherry control construct to generate E7 specific TCR T cells and rested for 5 days prior to culture.

[0143] FIG. 66 is a graph showing percent lysis of tumor isolated from the splenocytes of C57BL/6 HLA A1101 mice 15 days after they were administered splenocytes of 6-8 week old C57BL/6 HLA A1101 that were pulsed with soluble (SOL) KRAS G12V peptide, amphiphilic (AMP) KRAS G12V, or a PBS control and labeled fluorescent carboxyfluorescein succinimidyl ester (CFSE). Triple asterisks denote statistical significance at a level of p=0.0005, and double asterisks denote statistical significance at a level of p=0.0018.

[0144] FIG. 67 is a graph showing fold change in the number of T cells 1, 2, 5, and 8 days following 2:1 co-culture of human T cells retrovirally transduced to express a HLA A*11:01 Restricted KRAS G12D specific TCR (TCR701) with mature autologous dendritic cells that were previously labeled overnight for 18 hours with PBS, soluble (SOL) or amphiphilic (AMP) KRAS G1 2D peptide. T cells isolated from human peripheral blood mononuclear cells were spinoculated with viral supernatant collected from Phoenix-Ampho cells transfected with the TCR 701 KRAS G1 2D specific TCR T Cell construct or an mCherry control construct to generate KRAS specific TCR T cells and rested for 5 days prior to culture. Quadruple asterisks denote statistical significance at a level of p<0.0001.

[0145] FIG. 68 is a graph showing number of human TCR T cells in the peripheral blood of 10 day Panc-1 (HLA A11+, KRAS G12D+) tumor bearing NSG mice 3 days following infusion with human T cells retrovirally transduced to express a HLA A*11:01 Restricted KRAS G12D specific TCR (TCR701) that were co-cultured in a ratio of with mature autologous dendritic cells that were previously labeled overnight for 18 hours with PBS, or amphiphilic (AMP) KRAS G1 2D peptide. The T cells isolated from human peripheral blood mononuclear cells were spinoculated with viral supernatant collected from Phoenix-Ampho cells transfected with the TCR 701 KRAS G1 2D specific TCR T Cell construct or an mCherry control construct to generate KRAS specific TCR T cells and rested for 5 days prior to culture.

[0146] FIG. 69A is a graph showing the tumor mass in 10 day Panc-1 (HLA A11+, KRAS G12D+) tumor bearing NSG mice 35 days following infusion with human T cells retrovirally transduced to express a HLA A*11:01 Restricted KRAS G12D specific TCR (TCR701) that were co-cultured in a ratio of with mature autologous dendritic cells that were previously labeled overnight for 18 hours with PBS, or amphiphilic (AMP) KRAS G12D peptide. The T cells isolated from human peripheral blood mononuclear cells were spinoculated with viral supernatant collected from Phoenix-Ampho cells transfected with the TCR 701 KRAS G12D specific TCR T Cell construct or an mCherry control construct to generate KRAS specific TCR T cells and rested for 5 days prior to culture.

[0147] FIG. 69B is a graph showing number human TCR T cells found in the tumors of 10 day Panc-1 (HLA A11+, KRAS G12D+) tumor bearing NSG mice 35 days following infusion with human T cells retrovirally transduced to express a HLA A*11:01 Restricted KRAS G1 2D specific TCR (TCR701) that were co-cultured in a ratio of with mature autologous dendritic cells that were previously labeled overnight for 18 hours with PBS, or amphiphilic (AMP) KRAS G1 2D peptide. The T cells isolated from human peripheral blood mononuclear cells were spinoculated with viral supernatant collected from Phoenix-Ampho cells transfected with the TCR 701 KRAS G1 2D specific TCR T Cell construct or an mCherry control construct to generate KRAS specific TCR T cells and rested for 5 days prior to culture.

[0148] FIG. 70A is a graph showing the number of CD25+(bottom of each column), CD69+(middle of each column), and CD25+ and CD69+(top of each column) human TCR T Cells found on day 35 post infusion within Panc-1 (HLA A11+, KRAS G12D+) tumors that were implanted in NSG mice 10 days prior to T cell therapy. Human T cells were retrovirally transduced to express a HLA A*11:01 Restricted KRAS G12D specific TCR (TCR701) and co-cultured in a ratio of 2:1 with mature autologous dendritic cells that were previously labeled overnight for 18 hours with PBS, or amphiphilic (AMP) KRAS G12D peptide. Following in vitro co-culture, human T cells were isolated by negative bead selection prior to infusion into the 10-day Panc-1 tumor bearing NSG mice. 35 days following T cell infusion, the mice were euthanized and tumors were mechanically dissociated and analyzed by flow cytometry.

[0149] FIG. 70B is a graph showing the number of PD-1 positive (left column of each quadrant), double positive (middle column of each quadrant), and PD-1, TIM3, and LAG3 positive (right column of each quadrant) human TCR T Cells found on day 35 post infusion within Panc-1 (HLA A11+, KRAS G12D+) tumors that were implanted in NSG mice 10 days prior to T cell therapy. Human T cells were retrovirally transduced to express a HLA A*11:01 Restricted KRAS G12D specific TCR (TCR701) and co-cultured in a ratio of 2:1 with mature autologous dendritic cells that were previously labeled overnight for 18 hours with PBS, or amphiphilic (AMP) KRAS G1 2D peptide. Following in vitro co-culture, human T cells were isolated by negative bead selection prior to infusion into the 10-day Panc-1 tumor bearing NSG mice. 35 days following T cell infusion, the mice were euthanized and tumors were mechanically dissociated and analyzed by flow cytometry.

[0150] FIG. 71 is a graph showing the percentage of total T cells that are CD25+ T cells (bottom of each column), CD69+ T cells (middle of each column), and CD25+ and CD69+ T cells (top of each column) that were found 2 days following 2:1 co-culture of human T cells retrovirally transduced to express a HLA A*02:01 restricted NY-ESO-1 specific TCR (TCR1 G4) with mature autologous dendritic cells that were previously labeled overnight for 18 hours with PBS, soluble or amphiphilic NY-ESO-1 peptide. T cells isolated from human peripheral blood mononuclear cells were spinoculated with viral supernatant collected from Phoenix-Ampho cells transfected with the NY-ESO-1 specific TCR T Cell construct or an mCherry or MART-1 DMF5 TCR T control construct to generate NY-ESO-1 specific TCR T cells and rested for 5 days prior to culture. SOL=soluble labeling and AMP=amphiphile labeling.

[0151] FIG. 72A is a graph showing the amount of IFNγ secreted from cells 2 days following transfer of human T cells retrovirally transduced to express a HLA A*02:01 restricted NY-ESO-1 specific TCR (TCR1 G4) co-cultured in a ratio of 2:1 with mature autologous dendritic cells that were previously labeled overnight for 18 hours with PBS, soluble or amphiphilic NY-ESO-1 peptide. T cells isolated from human peripheral blood mononuclear cells were spinoculated with viral supernatant collected from Phoenix-Ampho cells transfected with the NY-ESO-1 specific TCR T Cell construct or an mCherry or MART-1 DMF5 TCR T control construct to generate NY-ESO-1 specific TCR T cells and rested for 5 days prior to culture. SOL=soluble labeling and AMP=amphiphile labeling.

[0152] FIG. 72B is a graph showing the amount of TNFα secreted from cells 2 days following transfer of human T cells retrovirally transduced to express a HLA A*02:01 restricted NY-ESO-1 specific TCR (TCR1 G4) co-cultured in a ratio of 2:1 with mature autologous dendritic cells that were previously labeled overnight for 18 hours with PBS, soluble or amphiphilic NY-ESO-1 peptide. T cells isolated from human peripheral blood mononuclear cells were spinoculated with viral supernatant collected from Phoenix-Ampho cells transfected with the NY-ESO-1 specific TCR T Cell construct or an mCherry or MART-1 DMF5 TCR T control construct to generate NY-ESO-1 specific TCR T cells and rested for 5 days prior to culture. SOL=soluble labeling and AMP=amphiphile labeling.

[0153] FIG. 72C is a graph showing the amount of IL-2 secreted from cells 2 days following transfer of human T cells retrovirally transduced to express a HLA A*02:01 restricted NY-ESO-1 specific TCR (TCR1 G4) co-cultured in a ratio of 2:1 with mature autologous dendritic cells that were previously labeled overnight for 18 hours with PBS, soluble or amphiphilic NY-ESO-1 peptide. T cells isolated from human peripheral blood mononuclear cells were spinoculated with viral supernatant collected from Phoenix-Ampho cells transfected with the NY-ESO-1 specific TCR T Cell construct or an mCherry or MART-1 DMF5 TCR T control construct to generate NY-ESO-1 specific TCR T cells and rested for 5 days prior to culture. SOL=soluble labeling and AMP=amphiphile labeling.

[0154] FIG. 72D is a graph showing the amount of GM-CSF (granulocyte-macrophage colony-stimulating factor) secreted from the cell 2 days following transfer of human T cells retrovirally transduced to express a HLA A*02:01 restricted NY-ESO-1 specific TCR (TCR1 G4) co-cultured in a ratio of 2:1 with mature autologous dendritic cells that were previously labeled overnight for 18 hours with PBS, soluble or amphiphilic NY-ESO-1 peptide. T cells isolated from human peripheral blood mononuclear cells were spinoculated with viral supernatant collected from Phoenix-Ampho cells transfected with the NY-ESO-1 specific TCR T Cell construct or an mCherry or MART-1 DMF5 TCR T control construct to generate NY-ESO-1 specific TCR T cells and rested for 5 days prior to culture. SOL=soluble labeling and AMP=amphiphile labeling.

[0155] FIG. 73A is a graph showing the amount of IFNγ secreted from cells 8 days following transfer of human T cells retrovirally transduced to express a HLA A*02:01 restricted NY-ESO-1 specific TCR (TCR1 G4) co-cultured in a ratio of 2:1 with mature autologous dendritic cells that were previously labeled overnight for 18 hours with PBS, soluble or amphiphilic NY-ESO-1 peptide. T cells isolated from human peripheral blood mononuclear cells were spinoculated with viral supernatant collected from Phoenix-Ampho cells transfected with the NY-ESO-1 specific TCR T Cell construct or an mCherry or MART-1 DMF5 TCR T control construct to generate NY-ESO-1 specific TCR T cells and rested for 5 days prior to culture. SOL=soluble labeling and AMP=amphiphile labeling.

[0156] FIG. 73B is a graph showing the amount of TNFα secreted from cells 8 days following transfer of human T cells retrovirally transduced to express a HLA A*02:01 restricted NY-ESO-1 specific TCR (TCR1 G4) co-cultured in a ratio of 2:1 with mature autologous dendritic cells that were previously labeled overnight for 18 hours with PBS, soluble or amphiphilic NY-ESO-1 peptide. T cells isolated from human peripheral blood mononuclear cells were spinoculated with viral supernatant collected from Phoenix-Ampho cells transfected with the NY-ESO-1 specific TCR T Cell construct or an mCherry or MART-1 DMF5 TCR T control construct to generate NY-ESO-1 specific TCR T cells and rested for 5 days prior to culture. SOL=soluble labeling and AMP=amphiphile labeling.

[0157] FIG. 73C is a graph showing the amount of IL-2 secreted from cells 8 days following transfer of human T cells retrovirally transduced to express a HLA A*02:01 restricted NY-ESO-1 specific TCR (TCR1 G4) co-cultured in a ratio of 2:1 with mature autologous dendritic cells that were previously labeled overnight for 18 hours with PBS, soluble or amphiphilic NY-ESO-1 peptide. T cells isolated from human peripheral blood mononuclear cells were spinoculated with viral supernatant collected from Phoenix-Ampho cells transfected with the NY-ESO-1 specific TCR T Cell construct or an mCherry or MART-1 DMF5 TCR T control construct to generate NY-ESO-1 specific TCR T cells and rested for 5 days prior to culture. SOL=soluble labeling and AMP=amphiphile labeling.

[0158] FIG. 73D is a graph showing the amount of GM-CSF secreted from the cell 8 days following transfer of human T cells retrovirally transduced to express a HLA A*02:01 restricted NY-ESO-1 specific TCR (TCR1 G4) co-cultured in a ratio of 2:1 with mature autologous dendritic cells that were previously labeled overnight for 18 hours with PBS, soluble or amphiphilic NY-ESO-1 peptide. T cells isolated from human peripheral blood mononuclear cells were spinoculated with viral supernatant collected from Phoenix-Ampho cells transfected with the NY-ESO-1 specific TCR T Cell construct or an mCherry or MART-1 DMF5 TCR T control construct to generate NY-ESO-1 specific TCR T cells and rested for 5 days prior to culture. SOL=soluble labeling and AMP=amphiphile labeling.

[0159] FIG. 74 is a graph showing the percent lysis of A375 human derived tumor line expressing a luciferase gene, HLA A*02:01, and the NY-ESO-1 tumor cells at various effector to target ratios after culture with a NY-ESO-1 specific TCR (TCR1 G4) alone or following overnight 2:1 culture with mature autologous dendritic cells that were previously labeled overnight for 18 hours with PBS, soluble (SOL) NY-ESO-1 peptide, or amphiphilic (AMP) NY-ESO-1 peptide. T cells isolated from human peripheral blood mononuclear cells were spinoculated with viral supernatant collected from Phoenix-Ampho cells transfected with the NY-ESO-1 specific TCR T Cell construct or an mCherry or MART-1 DMF5 TCR T control construct to generate NY-ESO-1 specific TCR T cells and rested for 5 days prior to culture.

[0160] FIG. 75 is a graph showing fold change in the number of T cells 1, 2, 5, and 8 days following transfer of human T cells retrovirally transduced to express a HLA A*02:01 restricted NY-ESO-1 specific TCR (TCR1 G4) co-cultured in a ratio of 2:1 with mature autologous dendritic cells that were previously labeled overnight for 18 hours with PBS, soluble (SOL) or amphiphilic (AMP) NY-ESO-1 peptide. T cells isolated from human peripheral blood mononuclear cells were spinoculated with viral supernatant collected from Phoenix-Ampho cells transfected with the NY-ESO-1 specific TCR T Cell construct or an mCherry or MART-1 DMF5 TCR T control construct to generate NY-ESO-1 specific TCR T cells and rested for 5 days prior to culture.

[0161] FIG. 76A is a graph showing the fold change in the TCR-T activation from cell cultures over 24 hours following transfer of human T cells retrovirally transduced to express a HLA A*02:01 restricted NY-ESO-1 specific TCR (TCR1 G4) co-cultured in a ratio of 2:1 with mature autologous dendritic cells that were previously labeled overnight for 18 hours with PBS, soluble (SOL) or amphiphilic (AMP) NY-ESO-1 peptide. T cells isolated from human peripheral blood mononuclear cells were spinoculated with viral supernatant collected from Phoenix-Ampho cells transfected with the NY-ESO-1 specific TCR T Cell construct or an mCherry or MART-1 DMF5 TCR T control construct to generate NY-ESO-1 specific TCR T cells and rested for 5 days prior to culture. Asterisk denotes statistical significance at a level of p=0.0286.

[0162] FIG. 76B is a graph showing the fold change in the TCR-T tumor lysis from cell cultures over 24 hours following transfer of human T cells retrovirally transduced to express a HLA A*02:01 restricted NY-ESO-1 specific TCR (TCR1 G4) co-cultured in a ratio of 2:1 with mature autologous dendritic cells that were previously labeled overnight for 18 hours with PBS, soluble (SOL) or amphiphilic (AMP) NY-ESO-1 peptide. T cells isolated from human peripheral blood mononuclear cells were spinoculated with viral supernatant collected from Phoenix-Ampho cells transfected with the NY-ESO-1 specific TCR T Cell construct or an mCherry or MART-1 DMF5 TCR T control construct to generate NY-ESO-1 specific TCR T cells and rested for 5 days prior to culture. Quadruple asterisks denote statistical significance at a level of p<0.0001.

[0163] FIG. 77 is a graph showing fold change in the number of T cells 1, 2, 5, and 8 days following 2:1 co-culture of human T cells retrovirally transduced to express a HLA A*02:01 restricted Human Papilloma Virus (HPV) 16 E7 specific TCR (TCRE7) alone or with mature autologous dendritic cells that were previously labeled overnight for 18 hours with PBS, soluble E7 peptide (solE7), or amphiphilic E7 peptide (ampE7). T cells isolated from human peripheral blood mononuclear cells were spinoculated with viral supernatant collected from Phoenix-Ampho cells transfected with the E7 specific TCR T Cell construct or an mCherry control construct to generate E7 specific TCR T cells and rested for 5 days prior to culture.

### DEFINITIONS

[0164] Terms used in the claims and specification are defined as set forth below unless otherwise specified.

[0165] It must be noted that, as used in the specification and the appended claims, the singular forms “a,” “an,” and “the” include plural referents unless the context clearly dictates otherwise.

[0166] As used herein, “about” will be understood by persons of ordinary skill and will vary to some extent depending on the context in which it is used. If there are uses of the term which are not clear to persons of ordinary skill given the context in which it is used, “about” will mean up to plus or minus 10% of the particular value.

[0167] As used herein, the term “adjuvant” refers to a compound that, with a specific immunogen or antigen, will augment or otherwise alter or modify the resultant immune response. Modification of the immune response includes intensification or broadening the specificity of either or both antibody and cellular immune responses. Modification of the immune response can also mean decreasing or suppressing certain antigen-specific immune responses. In certain embodiments, the adjuvant is a cyclic dinucleotide. In some embodiments, the adjuvant is an immunostimulatory oligonucleotide as described herein. In some embodiments, the adjuvant is administered prior to, concurrently, or after administration of an amphiphilic ligand conjugate, or composition comprising the conjugate. In some embodiments, the adjuvant is co-formulated in the same composition as an amphiphilic ligand conjugate.

[0168] “Amino acid” refers to naturally occurring and synthetic amino acids, as well as amino acid analogs and amino acid mimetics that function in a manner similar to the naturally occurring amino acids. Naturally occurring amino acids are those encoded by the genetic code, as well as those amino acids that are later modified, e.g., hydroxyproline, y-carboxyglutamate, and phosphoserine. Amino acid analogs refers to compounds that have the same basic chemical structure as a naturally occurring amino acid, i.e., a carbon that is bound to a hydrogen, a carboxyl group, an amino group, and an R group, e.g., homoserine, norleucine, methionine sulfoxide, methionine methyl sulfonium. Such analogs have modified R groups (e.g., norleucine) or modified peptide backbones, but retain the same basic chemical structure as a naturally occurring amino acid. Amino acid mimetics refers to chemical compounds that have a structure that is different from the general chemical structure of an amino acid, but that function in a manner similar to a naturally occurring amino acid. Amino acids can be referred to herein by either their commonly known three letter symbols or by the one-letter symbols recommended by the IUPAC-IUB Biochemical Nomenclature Commission. Nucleotides, likewise, can be referred to by their commonly accepted single-letter codes.

[0169] An “amino acid substitution” refers to the replacement of at least one existing amino acid residue in a predetermined amino acid sequence (an amino acid sequence of a starting polypeptide) with a second, different “replacement” amino acid residue. An “amino acid insertion” refers to the incorporation of at least one additional amino acid into a predetermined amino acid sequence. While the insertion will usually consist of the insertion of one or two amino acid residues, the present larger “peptide insertions,” can be made, e.g., by insertion of about three to about five or even up to about ten, fifteen, or twenty amino acid residues. The inserted residue(s) may be naturally occurring or non-naturally occurring as disclosed above. An “amino acid deletion” refers to the removal of at least one amino acid residue from a predetermined amino acid sequence.

[0170] As used herein, “amphiphile” or “amphiphilic” refers to a conjugate comprising a hydrophilic head group and a hydrophobic tail, thereby forming an amphiphilic conjugate. In some embodiments, an amphiphile conjugate comprises a peptide or a ligand for a MAIT cell and one or more hydrophobic lipid tails, referred to herein as an “amphiphilic ligand conjugate.” In some embodiments, the amphiphile conjugate further comprises a polymer (e.g., polyethylene glycol), wherein the polymer is conjugated to the one or more lipids or the peptide or a ligand for a MAIT cell.

[0171] The term “ameliorating” refers to any therapeutically beneficial result in the treatment of a disease state, e.g., cancer, including prophylaxis, lessening in the severity or progression, remission, or cure thereof.

[0172] The term “antigen presenting cell” or “APC” is a cell that displays foreign antigen complexed with MHC on its surface. T cells recognize this complex using T cell receptor (TCR). Examples of APCs include, but are not limited to, dendritic cells (DCs), peripheral blood mononuclear cells (PBMC), monocytes (such as THP-1), B lymphoblastoid cells (such as CIR.A2 and 1518 B-LCL) and monocyte-derived dendritic cells (DCs). Some APCs internalize antigens either by phagocytosis or by receptor-mediated endocytosis.

[0173] As used herein, the term “antigenic formulation” or “antigenic composition” or “immunogenic composition” refers to a preparation which, when administered to a vertebrate, especially a mammal, will induce an immune response.

[0174] The “intracellular signaling domain” means any oligopeptide or polypeptide domain known to function to transmit a signal causing activation or inhibition of a biological process in a cell, for example, activation of an immune cell such as a T cell or a NK cell. Examples include ILR chain, CD28, and/or CD3E.

[0175] As used herein, “cancer antigen” refers to (i) tumor-specific antigens, (ii) tumor-associated antigens, (iii) cells that express tumor-specific antigens, (iv) cells that express tumor-associated antigens, (v) embryonic antigens on tumors, (vi) autologous tumor cells, (vii) tumor-specific membrane antigens, (viii) tumor-associated membrane antigens, (ix) growth factor receptors, (x) growth factor ligands, and (xi) any other type of antigen or antigen-presenting cell or material that is associated with a cancer.

[0176] As used herein, “CG oligodeoxynucleotides (CG ODNs)”, also referred to as “CpG ODNs”, are short single-stranded synthetic DNA molecules that contain a cytosine nucleotide (C) followed by a guanine nucleotide (G). In certain embodiments, the immunostimulatory oligonucleotide is a CG ODN.

[0177] As used herein the term “co-stimulatory ligand” includes a molecule on an antigen presenting cell (e.g., an APC, dendritic cell, B cell, and the like) that specifically binds a cognate co-stimulatory molecule on a T cell, thereby providing a signal which, in addition to the primary signal provided by, for instance, binding of a TCR/CD3 complex with an MHC molecule loaded with peptide, mediates a T cell response, including, but not limited to, proliferation, activation, differentiation, and the like. A co-stimulatory ligand can include, but is not limited to, CD7, B7-I (CD80), B7-2 (CD86), PD-L1, PD-L2, 4-1 BBL, OX40L, inducible costimulatory ligand (ICOS-L), intercellular adhesion molecule (rCAM), CD30L, CD40, CD70, CD83, HLA-G, MICA, MICE, HVEM, lymphotoxin beta receptor, TR6, ILT3, ILT4, HVEM, an agonist or antibody that binds Toll ligand receptor and a ligand that specifically binds with B7-H3. A co-stimulatory ligand also encompasses, inter alia, an antibody that specifically binds with a co-stimulatory molecule present on a T cell, such as, but not limited to, CD27, CD28, 4-11BB, OX40, CD30, CD40, PD-I, ICOS, lymphocyte function-associated antigen-1 (LFA-1), CD2, CD7, LIGHT, NKG2C, B7-H3, and a ligand that specifically binds with CD83.

[0178] A “co-stimulatory molecule” refers to the cognate binding partner on a T cell that specifically binds with a co-stimulatory ligand, thereby mediating a co-stimulatory response by the T cell, such as, but not limited to, proliferation. Co-stimulatory molecules include, but are not limited to, an MHC class I molecule, BTLA, and a Toll ligand receptor.

[0179] A “co-stimulatory signal”, as used herein, refers to a signal, which in combination with a primary signal, such as TCR/CD3 ligation, leads to T cell proliferation and/or upregulation or downregulation of key molecules.

[0180] A polypeptide or amino acid sequence “derived from” a designated polypeptide or protein or a “polypeptide fragment” refers to the origin of the polypeptide. Preferably, the polypeptide or amino acid sequence which is derived or is a fragment of is from a particular sequence that has an amino acid sequence that is essentially identical to that sequence or a portion thereof, wherein the portion consists of at least 10-20 amino acids, preferably at least 20-30 amino acids, more preferably at least 30-50 amino acids, or which is otherwise identifiable to one of ordinary skill in the art as having its origin in the sequence. Polypeptides derived from or that are fragments of another peptide may have one or more mutations relative to the starting polypeptide, e.g., one or more amino acid residues which have been substituted with another amino acid residue or which has one or more amino acid residue insertions or deletions.

[0181] As used herein, the term “drug metabolite” refers to a therapeutic drug molecule or its intermediary or resulting products formed through the break down of the drug molecule that is capable of binding to major histocompatibility complex class I-related protein.

[0182] A polypeptide can comprise an amino acid sequence which is not naturally occurring. Such variants necessarily have less than 100% sequence identity or similarity with the starting molecule. In a preferred embodiment, the variant will have an amino acid sequence from about 75% to less than 100% amino acid sequence identity or similarity with the amino acid sequence of the starting polypeptide, more preferably from about 80% to less than 100%, more preferably from about 85% to less than 100%, more preferably from about 90% to less than 100% (e.g., 91%, 92%, 93%, 94%, 95%, 96%, 97%, 98%, 99%) and most preferably from about 95% to less than 100%, e.g., over the length of the variant molecule.

[0183] In one embodiment, there is one amino acid difference between a starting polypeptide sequence and the sequence derived therefrom. Identity or similarity with respect to this sequence is defined herein as the percentage of amino acid residues in the candidate sequence that are identical (i.e., same residue) with the starting amino acid residues, after aligning the sequences and introducing gaps, if necessary, to achieve the maximum percent sequence identity.

[0184] As used herein, the term antigen “cross-presentation” refers to presentation of exogenous protein antigens to T cells via MHC class I and class II molecules on APCs.

[0185] As used herein, the term “cytotoxic T lymphocyte (CTL) response” refers to an immune response induced by cytotoxic T cells. CTL responses are mediated primarily by CD8+ T cells.

[0186] As used herein, the term “effective dose” or “effective dosage” is defined as an amount sufficient to achieve or at least partially achieve the desired effect.

[0187] The term “therapeutically effective dose” is defined as an amount sufficient to cure or at least partially arrest the disease and its complications in a patient already suffering from the disease. Amounts effective for this use will depend upon the severity of the disorder being treated and the general state of the patient's own immune system.

[0188] As used herein, the term “effector cell” or “effector immune cell” refers to a cell involved in an immune response, e.g., in the promotion of an immune effector response. In some embodiments, immune effector cells specifically recognize an antigen. Examples of immune effector cells include, but are not limited to, Natural Killer (NK) cells, B cells, monocytes, macrophages, T cells (e.g., cytotoxic T lymphocytes (CTLs). In some embodiments, the effector cell is a T cell.

[0189] As used herein, the term “immune effector function” or “immune effector response” refers to a function or response of an immune effector cell that promotes an immune response to a target.

[0190] As used herein, “immune cell” is a cell of hematopoietic origin and that plays a role in the immune response. Immune cells include lymphocytes (e.g., B cells and T cells), natural killer cells, and myeloid cells (e.g., monocytes, macrophages, eosinophils, mast cells, basophils, and granulocytes). In particular embodiments, the immune cell is T cell.

[0191] As used herein, “immune response” refers to a response made by the immune system of an organism to a substance, which includes but is not limited to foreign or self proteins. Three general types of “immune response” include mucosal, humoral, and cellular immune responses. For example, the immune response can include the activation, expansion, and/or increased proliferation of an immune cell. An immune response may also include at least one of the following: cytokine production, T cell activation and/or proliferation, granzyme or perforin production, activation of antigen presenting cells or dendritic cells, antibody production, inflammation, developing immunity, developing hypersensitivity to an antigen, the response of antigen-specific lymphocytes to antigen, clearance of an infectious agent, and transplant or graft rejection.

[0192] As used herein, an “immunostimulatory oligonucleotide” is an oligonucleotide that can stimulate (e.g., induce or enhance) an immune response.

[0193] The terms “inducing an immune response” and “enhancing an immune response” are used interchangeably and refer to the stimulation of an immune response (i.e., either passive or adaptive) to a particular antigen.

[0194] The term “induce” as used with respect to inducing complement dependent cytotoxicity (CDC) or antibody-dependent cellular cytotoxicity (ADCC) refer to the stimulation of particular direct cell killing mechanisms.

[0195] As used herein, a subject “in need of prevention,” “in need of treatment,” or “in need thereof,” refers to one, who by the judgment of an appropriate medical practitioner (e.g., a doctor, a nurse, or a nurse practitioner in the case of humans; a veterinarian in the case of non-human mammals), would reasonably benefit from a given treatment (such as treatment with a composition comprising an amphiphilic ligand conjugate).

[0196] The term “in vivo” refers to processes that occur in a living organism.

[0197] The term “in vitro” refers to processes that occur outside a living organism, such as in a test tube, flask, or culture plate.

[0198] As used herein, the term “ligand for a mucosal-associated invariant T-cell (MAIT)” or “MAIT ligand” refers any natural or synthetic molecule (e.g., small molecule, protein, peptide, lipid, carbohydrate, nucleic acid) or part or fragment thereof that can specifically bind to the MAIT.

[0199] As used herein, the terms “linked,” “operably linked,” “fused,” or “fusion,” are used interchangeably. These terms refer to the joining together of two more elements or components or domains, by an appropriate means including chemical conjugation or recombinant DNA technology. Methods of chemical conjugation (e.g., using heterobifunctional crosslinking agents) are known in the art as are methods of recombinant DNA technology.

[0200] The term “lipid” refers to a biomolecule that is soluble in nonpolar solvents and insoluble in water. Lipids are often described as hydrophobic or amphiphilic molecules which allows them to form structures such as vesicles or membranes in aqueous environments. Lipids include fatty acids, glycerolipids, glycerophospholipids, sphingolipids, sterol lipids (including cholesterol), prenol lipids, saccharolipids, and polyketides. In some embodiments, the lipid suitable for the amphiphilic ligand conjugates of the disclosure binds to human serum albumin under physiological conditions. In some embodiments, the lipid suitable for the amphiphilic ligand conjugates of the disclosure inserts into a cell membrane under physiological conditions. In some embodiments, the lipid binds albumin and inserts into a cell membrane under physiological conditions. In some embodiments, the lipid is a diacyl lipid. In some embodiments, the diacyl lipid includes at least 12 carbons. In some embodiments, the diacyl lipid includes 12-30 hydrocarbon units, 14-25 hydrocarbon units, or 16-20 hydrocarbon units. In some embodiments, the diacyl lipid includes 12, 13, 14, 15, 16, 17, 18, 19, 20, 21, 22, 23, 24, 25, 26, 27, 28, 29 or 30 carbons.

[0201] “Nucleic acid” refers to deoxyribonucleotides or ribonucleotides and polymers thereof in either single- or double-stranded form. Unless specifically limited, the term encompasses nucleic acids containing known analogues of natural nucleotides that have similar binding properties as the reference nucleic acid and are metabolized in a manner similar to naturally occurring nucleotides. Unless otherwise indicated, a particular nucleic acid sequence also implicitly encompasses conservatively modified variants thereof (e.g., degenerate codon substitutions) and complementary sequences and as well as the sequence explicitly indicated. Specifically, degenerate codon substitutions can be achieved by generating sequences in which the third position of one or more selected (or all) codons is substituted with mixed-base and/or deoxyinosine residues (Batzer et al., Nucleic Acid Res. 19:5081, 1991; Ohtsuka et al., J. Biol. Chem. 260:2605-2608, 1985); and Cassol et al., 1992; Rossolini et al., Mal. Cell. Probes 8:91-98, 1994). For arginine and leucine, modifications at the second base can also be conservative. The term nucleic acid is used interchangeably with gene, cDNA, and mRNA encoded by a gene.

[0202] Polynucleotides of the present invention can be composed of any polyribonucleotide or polydeoxyribonucleotide, which can be unmodified RNA or DNA or modified RNA or DNA. For example, polynucleotides can be composed of single- and double-stranded DNA, DNA that is a mixture of single- and double-stranded regions, single- and double-stranded RNA, and RNA that is mixture of single- and double-stranded regions, hybrid molecules comprising DNA and RNA that can be single-stranded or, more typically, double-stranded or a mixture of single- and double stranded regions. In addition, the polynucleotide can be composed of triple-stranded regions comprising RNA or DNA or both RNA and DNA. A polynucleotide can also contain one or more modified bases or DNA or RNA backbones modified for stability or for other reasons. “Modified” bases include, for example, tritylated bases and unusual bases such as inosine. A variety of modifications can be made to DNA and RNA; thus, “polynucleotide” embraces chemically, enzymatically, or metabolically modified forms. In some embodiments, the peptides of the invention are encoded by a nucleotide sequence. Nucleotide sequences of the invention can be useful for a number of applications, including: cloning, gene therapy, protein expression and purification, mutation introduction, DNA vaccination of a host in need thereof, antibody generation for, e.g., passive immunization, PCR, primer and probe generation, and the like.

[0203] As used herein, “parenteral administration,” “administered parenterally,” and other grammatically equivalent phrases, refer to modes of administration other than enteral and topical administration, usually by injection, and include, without limitation, intravenous, intranasal, intraocular, intramuscular, intraarterial, intrathecal, intracapsular, intraorbital, intracardiac, intradermal, intraperitoneal, transtracheal, subcutaneous, subcuticular, intraarticular, subcapsular, subarachnoid, intraspinal, epidural, intracerebral, intracranial, intracarotid and intrasternal injection and infusion.

[0204] As generally used herein, “pharmaceutically acceptable” refers to those compounds, materials, compositions, and/or dosage forms which are, within the scope of sound medical judgment, suitable for use in contact with the tissues, organs, and/or bodily fluids of human beings and animals without excessive toxicity, irritation, allergic response, or other problems or complications commensurate with a reasonable benefit/risk ratio.

[0205] As used herein, the term “physiological conditions” refers to the in vivo condition of a subject. In some embodiments, physiological condition refers to a neutral pH (e.g., pH between 6-8).

[0206] “Polypeptide,” “peptide”, and “protein” are used interchangeably herein to refer to a polymer of amino acid residues. The terms apply to amino acid polymers in which one or more amino acid residue is an artificial chemical mimetic of a corresponding naturally occurring amino acid, as well as to naturally occurring amino acid polymers and non-naturally occurring amino acid polymer.

[0207] As used herein, the term “riboflavin metabolite” refers to the intermediary or resulting products of riboflavin metabolism which include a ribityl group and are capable of binding to major histocompatibility complex class I-related protein.

[0208] As used herein, a “small molecule” is a molecule with a molecular weight below about 500 Daltons.

[0209] As used herein, a “small metabolite ligand” refers to a small molecule that is capable of binding to a major histocompatibility complex class-I related protein and is produced or used during all the physical and chemical processes within the body that create and use energy and include, but are not limited to, lipids, steroids, amino acids, organic acids, bile acids, eicosanoids, peptides, trace elements, and pharmacophore and drug breakdown products

[0210] As used herein, the term “subject” or “mammal” or “patient” includes any human or non-human animal. For example, the methods and compositions of the present invention can be used to treat a subject with a cancer or infection. The term “non-human animal” includes all vertebrates, e.g., mammals and non-mammals, such as non-human primates, sheep, dogs, cats, mice, horses, pigs, cows, chickens, amphibians, reptiles, etc.

[0211] The term “sufficient amount” or “amount sufficient to” means an amount sufficient to produce a desired effect, e.g., an amount sufficient to reduce the diameter of a tumor.

[0212] The term “T cell” refers to a type of white blood cell that can be distinguished from other white blood cells by the presence of a T cell receptor on the cell surface. There are several subsets of T cells, including, but not limited to, T helper cells (a.k.a. T_{H} cells or CD4⁺ T cells) and subtypes, including T_{H}, T_{H}2, T_{H}3, T_{H}17, T_{H}9, and T_{FH} cells, cytotoxic T cells (i.e., Tc cells, CD8⁺ T cells, cytotoxic T lymphocytes, T-killer cells, killer T cells), memory T cells and subtypes, including central memory T cells (T_{CM} cells), effector memory T cells (T_{EM} and T_{EMRA} cells), and resident memory T cells (T_{RM} cells), regulatory T cells (a.k.a. Treg cells or suppressor T cells) and subtypes, including CD4⁺FOXP3⁺ T_{reg} cells, CD4⁺FOXP3⁻ T_{reg} cells, Tr1 cells, Th3 cells, and T_{reg}17 cells, natural killer T cells (a.k.a. NKT cells), mucosal associated invariant T cells (MAITs), and gamma delta T cells (γδ T cells), including Vγ9/Vδ2 T cells. Any one or more of the aforementioned or unmentioned T cells may be the target cell type for a method of use of the invention.

[0213] As used herein, the term “T cell activation” or “activation of T cells” refers to a cellular process in which mature T cells, which express antigen-specific T cell receptors on their surfaces, recognize their cognate antigens and respond by entering the cell cycle, secreting cytokines or lytic enzymes, and initiating or becoming competent to perform cell-based effector functions. T cell activation requires at least two signals to become fully activated. The first occurs after engagement of the T cell antigen-specific receptor (TCR) by the antigen-major histocompatibility complex (MHC), and the second by subsequent engagement of co-stimulatory molecules (e.g., CD28). These signals are transmitted to the nucleus and result in clonal expansion of T cells, upregulation of activation markers on the cell surface, differentiation into effector cells, induction of cytotoxicity or cytokine secretion, induction of apoptosis, or a combination thereof.

[0214] As used herein, the term “T cell-mediated response” refers to any response mediated by T cells, including, but not limited to, effector T cells (e.g., CD8⁺ cells) and helper T cells (e.g., CD4⁺ cells). T cell mediated responses include, for example, T cell cytotoxicity and proliferation.

[0215] The term “T cell cytotoxicity” includes any immune response that is mediated by CDS⁺ T cell activation. Exemplary immune responses include cytokine production, CD8⁺ T cell proliferation, granzyme or perforin production, and clearance of an infectious agent.

[0216] As used herein, the term “target-binding domain” of an extracellular domain refers to a polypeptide found on the outside of the cell that is sufficient to facilitate binding to a target. The target-binding domain will specifically bind to its binding partner, i.e., the target. As non-limiting examples, the target-binding domain can include an antigen-binding domain of an antibody, or a ligand, which recognizes and binds with a cognate binding partner protein. In this context, a ligand is a molecule that binds specifically to a portion of a protein and/or receptor. The cognate binding partner of a ligand useful in the methods and compositions described herein can generally be found on the surface of a cell. Ligand:cognate partner binding can result in the alteration of the ligand-bearing receptor, or activate a physiological response, for example, the activation of a signaling pathway. In one embodiment, the ligand can be non-native to the genome. Optionally, the ligand has a conserved function across at least two species. In some embodiments, the ligand is a cancer antigen. In some embodiments, the ligand is a tumor-associated antigen.

[0217] A “therapeutic antibody” is an antibody, fragment of an antibody, or construct that is derived from an antibody, and can bind to a cell-surface antigen on a target cell to cause a therapeutic effect. Such antibodies can be chimeric, humanized or fully human antibodies. Methods are known in the art for producing such antibodies. Such antibodies include single chain Fv fragments of antibodies, minibodies and diabodies. Any of the therapeutic antibodies known in the art to be useful for cancer therapy can be used in combination therapy with the compositions described herein. Therapeutic antibodies may be monoclonal antibodies or polyclonal antibodies. In preferred embodiments, the therapeutic antibodies target cancer antigens.

[0218] As used herein, “therapeutic protein” refers to any polypeptide, protein, protein variant, fusion protein and/or fragment thereof which may be administered to a subject as a medicament. The term “therapeutically effective amount” is an amount that is effective to ameliorate a symptom of a disease. A therapeutically effective amount can be a “prophylactically effective amount” as prophylaxis can be considered therapy.

[0219] The terms “treat,” “treating,” and “treatment,” as used herein, refer to therapeutic or preventative measures described herein. The methods of “treatment” employ administration to a subject, in need of such treatment, an amphiphilic ligand conjugate of the present disclosure, for example, a subject receiving T cell immunotherapy. In some embodiments, an amphiphilic ligand conjugate is administered to a subject in need of an enhanced immune response against a particular antigen or a subject who ultimately may acquire such a disorder, in order to prevent, cure, delay, reduce the severity of, or ameliorate one or more symptoms of the disorder or recurring disorder, or in order to prolong the survival of a subject beyond that expected in the absence of such treatment.

[0220] The term “tumor-associated antigen” refers to an antigen that is produced in a tumor and can be detected by the immune system to trigger an immune response. Tumor-associated antigens have been identified in many human cancers including lung, skin, hematologic, brain, liver, breast, rectal, bladder, and stomach cancers.

[0221] As used herein, “vaccine” refers to a formulation which contains an amphiphilic ligand conjugate and a TCR modified immune cell as described herein, optionally combined with an adjuvant, which is in a form that is capable of being administered to a vertebrate and which induces a protective immune response sufficient to induce immunity to prevent and/or ameliorate a disease or condition (e.g., cancer) and/or to reduce at least one symptom of a disease or condition (e.g., cancer) and/or to enhance the efficacy of a TCR modified immune cell, e.g., a TCR modified T cell. Typically, the vaccine comprises a conventional saline or buffered aqueous solution medium in which a composition as described herein is suspended or dissolved. In this form, a composition as described herein is used to prevent, ameliorate, or otherwise treat an infection or disease. Upon introduction into a host, the vaccine provokes an immune response including, but not limited to, the inducing a protective immune response to induce immunity to prevent and/or ameliorate a disease or condition (e.g., cancer) and/or to reduce at least one symptom of a disease or condition and/or to enhance the efficacy of a TCR modified immune cells, e.g., a TCR modified T cell.

### DETAILED DESCRIPTION

[0222] Described herein are methods for stimulating an immune response to a target cell population in a subject, where the methods include administering to the subject an amphiphilic lipid conjugate including a lipid, a peptide (e.g., a tumor associated antigen), and optionally a linker, and an immune cell modified with a T cell receptor (TCR) e.g., a TCR modified T cell, where the T cell receptor binds the peptide of the amphiphilic ligand conjugate. Such methods are useful for, e.g., treating a human subject with cancer.

### Amphiphilic Conjugates

[0223] In certain embodiments, amphiphilic conjugates are used with a T cell receptor expressing immune cell therapy. In some embodiments, the amphiphilic conjugate stimulates a specific immune response against a specific target, such as a tumor-associated antigen. In some embodiments, the amphiphilic conjugate induces activation, expansion, or proliferation of an immune cell expressing a T cell receptor in vivo. In some embodiments, the amphiphilic conjugate induces activation, proliferation, phenotypic maturation, or acquisition of cytotoxic function of a TCR T cell in vitro by culturing the TCR T cell in the presence of a dendritic cell including an amphiphilic ligand conjugate. In some embodiments, the amphiphilic conjugate includes a ligand, and is referred to herein as an “amphiphilic ligand conjugate.”

[0224] The structure of an amphiphilic ligand conjugate as described herein includes a lipophilic moiety, or “lipid tail”, (e.g., DSPE) covalently linked, optionally via a linker (e.g., PEG-2000), to one or more cargos. The amphiphilic ligand conjugate cargo can include a T cell receptor target. The modularity of this design allows for various ligands including, but not limited to, small molecules (e.g., fluorescein isothiocyanate (FITC)), short peptides (e.g., a linear peptide providing an epitope specific for a T cell receptor), ligands for MAIT cells (e.g. riboflavin metabolites and drug metabolites), or modular protein domains (e.g., folded polypeptide or polypeptide fragment providing a conformational epitope specific for a T cell receptor), or any one of the T cell receptor targets described herein, to be covalently linked to the lipid, resulting in amphiphilic ligand conjugates with tailored specificity.

[0225] Upon administration, without being bound by theory, the amphiphilic ligand conjugate is thought to be delivered to lymph nodes where the lipid tail portion is inserted into the membrane of antigen presenting cells (APCs), resulting in the decoration of the APC with ligands. The embedded ligands function as specific targets for an engineered receptor (i.e., a T cell receptor) expressed on the surface of prior, subsequent, or co-administered immune cells expressing said receptor, resulting in the recruitment of the immune cells to the ligand-decorated APCs. Interaction of the engineered receptor with the embedded ligand provides a stimulatory signal through the engineered receptor while the APC additionally presents other naturally occurring co-stimulatory signals, resulting in optimal immune cell activation, prolonged survival, and efficient memory formation.

[0226] Amphiphilic ligand conjugates can be generated using methods known in the art, such as those described in US 2013/0295129, which is hereby incorporated by reference in its entirety. For example, N-terminal cysteine modified peptides can be dissolved in DMF (dimethylformamide) and mixed with 2 equivalents Maleimide-PEG₂₀₀₀-DSPE (Laysan Bio, Inc.), and agitating the mixture at room temperature for 24 hours. Bioconjugation can be assessed by HPLC analysis.

### Lipid Conjugates

[0227] In certain embodiments, a lipid conjugate (e.g., an amphiphilic ligand conjugate), as described in US 2013/0295129, herein incorporated by reference in its entirety, is used in the methods disclosed herein. A lipid conjugate includes an albumin-binding lipid and a cargo to efficiently target the cargo to lymph nodes in vivo. Lipid conjugates bind to endogenous albumin, which targets them to lymphatics and draining lymph nodes where they accumulate due to the filtering of albumin by antigen presenting cells. In some embodiments, the lipid conjugate includes an antigenic peptide, molecular adjuvant, or ligand for a MAIT cell, and thereby induces or enhances a robust immune response. In some embodiments, the lipid conjugate includes a T cell receptor ligand, and thereby can induce or enhance expansion, proliferation, and/or activation of immune cells expressing a T cell receptor.

[0228] Lymph node-targeting conjugates typically include three domains: a highly lipophilic, albumin-binding domain (e.g., an albumin-binding lipid), a cargo such as a peptide, ligand for a MAIT cell, or molecular adjuvant, and a polar block linker, which promotes solubility of the conjugate and reduces the ability of the lipid to insert into cellular plasma membranes. Accordingly, in certain embodiments, the general structure of the conjugate is L-P-C, where “L” is an albumin-binding lipid, “P” is a polar block, and “C” is a cargo such as a peptide or a molecular adjuvant. In some embodiments, the cargo itself can also serve as the polar block domain, and a separate polar block domain is not required. Therefore, in certain embodiments the conjugate has only two domains: an albumin-binding lipid and a cargo, e.g., a peptide.

[0229] In some embodiments, the cargo of the conjugate is a peptide or a ligand for a MAIT cell, such as in an amphiphilic ligand conjugate. In other embodiments, is the peptide is an antigenic peptide. In further embodiments, the peptide is a tumor associated antigenic peptide. In yet other embodiments, the peptide is a T cell receptor target, e.g., an epitope. In some embodiments, the amphiphilic ligand conjugate is administered or formulated with an adjuvant, wherein the adjuvant is an amphiphilic conjugate including a molecular adjuvant such as an immunostimulatory oligonucleotide.

[0230] Optionally, the amphiphilic ligand conjugate is in the form of a pharmaceutically acceptable salt. The term “pharmaceutically acceptable salt,” as used herein, means any pharmaceutically acceptable salt of a conjugate, oligonucleotide, or peptide disclosed herein. Pharmaceutically acceptable salts of any of the compounds described herein may include those that are within the scope of sound medical judgment, suitable for use in contact with the tissues of humans and animals without undue toxicity, irritation, allergic response and are commensurate with a reasonable benefit/risk ratio. Pharmaceutically acceptable salts are well known in the art. For example, pharmaceutically acceptable salts are described in: Berge et al., J. Pharmaceutical Sciences 66:1-19, 1977 and in Pharmaceutical Salts: Properties, Selection, and Use, (Eds. P. H. Stahl and C. G. Wermuth), Wiley-VCH, 2008. The salts can be prepared in situ during the final isolation and purification of the compounds described herein or separately by reacting a free base group with a suitable acid. Representative acid addition salts include acetate, adipate, alginate, ascorbate, aspartate, benzenesulfonate, benzoate, bisulfate, borate, butyrate, camphorate, camphorsulfonate, citrate, cyclopentanepropionate, digluconate, dodecylsulfate, ethanesulfonate, fumarate, glucoheptonate, glycerophosphate, hemisulfate, heptonate, hexanoate, hydrobromide, hydrochloride, hydroiodide, 2-hydroxy-ethanesulfonate, lactobionate, lactate, laurate, lauryl sulfate, malate, maleate, malonate, methanesulfonate, 2-naphthalenesulfonate, nicotinate, nitrate, oleate, oxalate, palmitate, pamoate, pectinate, persulfate, 3-phenylpropionate, phosphate, picrate, pivalate, propionate, stearate, succinate, sulfate, tartrate, thiocyanate, toluenesulfonate, undecanoate, valerate salts, and the like. Representative alkali or alkaline earth metal salts include sodium, lithium, potassium, calcium, magnesium, and the like, as well as nontoxic ammonium, quaternary ammonium, and amine cations, including, but not limited to ammonium, tetramethylammonium, tetraethylammonium, methylamine, dimethylamine, trimethylamine, triethylamine, ethylamine, and the like. References to conjugates (e.g., amphiphilic ligand conjugates), oligonucleotides, or peptides in the claims are to be interpreted to optionally include pharmaceutically acceptable salts thereof.

### Lipids

[0231] The amphiphilic ligand conjugates typically include a hydrophobic lipid. The lipid can be linear, branched, or cyclic. In certain embodiments, the activity relies, in part, on the ability of the conjugate to insert itself into a cell membrane. Therefore, lymph node-targeted conjugates typically include a lipid that undergo membrane insertion under physiological conditions. Lipids suitable for membrane insertion can be selected based on the ability of the lipid or a lipid conjugate including the lipid to bind to interact with a cell membrane. Suitable methods for testing the membrane insertion of the lipid or lipid conjugate are known in the art.

[0232] Examples of preferred lipids for use in lymph node targeting lipid conjugates include, but are not limited to, fatty acids with aliphatic tails of 3-30 carbons including, but not limited to, linear unsaturated and saturated fatty acids, branched saturated and unsaturated fatty acids, and fatty acids derivatives, such as fatty acid esters, fatty acid amides, and fatty acid thioesters, diacyl lipids, cholesterol, cholesterol derivatives, and steroid acids such as bile acids, Lipid A or combinations thereof.

[0233] In certain embodiments, the lipid is a diacyl lipid or two-tailed lipid. In some embodiments, the tails in the diacyl lipid contain from about 12 to about 30 carbons (e.g., 13 14, 15, 16, 17, 18, 19, 20, 21, 22, 23, 24, 25, 26, 27, 28, or 29). In some embodiments the tails in the diacyl lipid contain about 14 to about 25 carbons (e.g., 15, 16, 17, 18, 19, 20, 21, 22, 23, or 24). In some embodiments, the tails of the diacyl lipid contain from about 16 to about 20 carbons (e.g., 17, 18, or 19). In some embodiments, the diacyl lipid comprises 12, 13, 14, 15, 16, 17, 18, 19, 20, 21, 22, 23, 24, 25, 26, 27, 28, 29 or 30 carbons.

[0234] The carbon tails of the diacyl lipid can be saturated, unsaturated, or combinations thereof. The tails can be coupled to the head group via ester bond linkages, amide bond linkages, thioester bond linkages, or combinations thereof. In a particular embodiment, the diacyl lipids are phosphate lipids, glycolipids, sphingolipids, or combinations thereof.

[0235] Preferably, membrane-inserting conjugates include a lipid that is μ or fewer carbon units in length, as it is believed that increasing the number of lipid units can reduce insertion of the lipid into plasma membrane of cells, allowing the lipid conjugate to remain free to bind albumin and traffic to the lymph node.

### Molecular Adjuvants

[0236] In certain embodiments, amphiphilic oligonucleotide conjugates are used with the amphiphilic ligand conjugate. The oligonucleotide conjugates typically contain an immunostimulatory oligonucleotide.

[0237] In certain embodiments, the immunostimulatory oligonucleotide can serve as a ligand for pattern recognition receptors (PRRs). Examples of PRRs include the Toll-like family of signaling molecules that play a role in the initiation of innate immune responses and also influence the later and more antigen specific adaptive immune responses. Therefore, the oligonucleotide can serve as a ligand for a Toll-like family signaling molecule, such as Toll-Like Receptor 9 (TLR9).

[0238] For example, unmethylated CpG sites can be detected by TLR9 on plasmacytoid dendritic cells and B cells in humans (Zaida, et al., Infection and Immunity, 76(5):2123-2129, (2008)). Therefore, the sequence of oligonucleotide can include one or more unmethylated cytosine-guanine (CG or CpG, used interchangeably) dinucleotide motifs. The ‘p’ refers to the phosphodiester backbone of DNA, as discussed in more detail below, some oligonucleotides including CG can have a modified backbone, for example a phosphorothioate (PS) backbone.

[0239] In certain embodiments, an immunostimulatory oligonucleotide can contain more than one CG dinucleotide, arranged either contiguously or separated by intervening nucleotide(s). The CpG motif(s) can be in the interior of the oligonucleotide sequence. Numerous nucleotide sequences stimulate TLR9 with variations in the number and location of CG dinucleotide(s), as well as the precise base sequences flanking the CG dimers.

[0240] Typically, CG ODNs are classified based on their sequence, secondary structures, and effect on human peripheral blood mononuclear cells (PBMCs). The five classes are Class A (Type D), Class B (Type K), Class C, Class P, and Class S (Vollmer, J & Krieg, A M, Advanced drug delivery reviews 61(3): 195-204 (2009), incorporated herein by reference). CG ODNs can stimulate the production of Type I interferons (e.g., IFNα) and induce the maturation of dendritic cells (DCs). Some classes of ODNs are also strong activators of natural killer (NK) cells through indirect cytokine signaling. Some classes are strong stimulators of human B cell and monocyte maturation (Weiner, G L, PNAS USA 94(20): 10833-7 (1997); Dalpke, A H, Immunology 106(1): 102-12 (2002); Hartmann, G, J of Immun. 164(3):1617-2 (2000), each of which is incorporated herein by reference).

[0241] According to some embodiments, a lipophilic-CpG oligonucleotide conjugate is used to enhance an immune response to an antigen. An exemplary lipophilic-CpG oligonucleotide conjugate includes the sequence 5′-TCGTCGTTTTGTCGTTTTGTCGTT-3′ (SEQ ID NO:1125). The CpG oligonucleotide sequence is linked, at its 5′ end, to a lipid, such as the following:

[chemical structure]

[0242] where X is O or S. Preferably, X is S. The CpG oligonucleotide may be directly bonded to the lipid. Alternatively, the CpG oligonucleotide may be linked to the lipid through a linker, such as GG. In the exemplary CpG oligonucleotide, all internucleoside groups are phosphorothioates (e.g., all internucleoside groups in the compound may be phosphorothioates).

[0243] Another exemplary lipophilic-CpG oligonucleotide is represented by the following, wherein “L” is a lipophilic compound, such as diacyl lipid, “Gₙ” is a guanine repeat linker and “n” represents 1, 2, 3, 4, or 5.
[0244] 5′-L-GₙTCCATGACGTTCCTGACGTT-3′ (SEQ ID NO: 1124)

[0245] Other PRR Toll-like receptors include TLR3, and TLR7 which may recognize double-stranded RNA, single-stranded and short double-stranded RNAs, respectively, and retinoic acid-inducible gene I (RIG-I)-like receptors, namely RIG-1 and melanoma differentiation-associated gene 5 (MDA5), which are best known as RNA-sensing receptors in the cytosol. Therefore, in certain embodiments, the oligonucleotide contains a functional ligand for TLR3, TLR7, or RIG-1-like receptors, or combinations thereof.

[0246] Examples of immunostimulatory oligonucleotides, and methods of making them are known in the art, see for example, Bodera, P. Recent Pat Inflamm Allergy Drug Discov. 5(1):87-93 (2011), incorporated herein by reference.

[0247] In certain embodiments, the oligonucleotide cargo includes two or more immunostimulatory sequences.

[0248] The oligonucleotide can be between 2-100 nucleotide bases in length, including for example, 5 nucleotide bases in length, 10 nucleotide bases in length, 15 nucleotide bases in length, 20 nucleotide bases in length, 25 nucleotide bases in length, 30 nucleotide bases in length, 35 nucleotide bases in length, 40 nucleotide bases in length, 45 nucleotide bases in length, 50 nucleotide bases in length, 60 nucleotide bases in length, 70 nucleotide bases in length, 80 nucleotide bases in length, 90 nucleotide bases in length, 95 nucleotide bases in length, 98 nucleotide bases in length, 100 nucleotide bases in length or more.

[0249] The 3′ end or the 5′ end of the oligonucleotides can be conjugated to the polar block or the lipid. In certain embodiments the 5′ end of the oligonucleotide is linked to the polar block or the lipid.

[0250] The oligonucleotides can be DNA or RNA nucleotides which typically include a heterocyclic base (nucleic acid base), a sugar moiety attached to the heterocyclic base, and a phosphate moiety which esterifies a hydroxyl function of the sugar moiety. The principal naturally-occurring nucleotides include uracil, thymine, cytosine, adenine and guanine as the heterocyclic bases, and ribose or deoxyribose sugar linked by phosphodiester bonds. In certain embodiments, the oligonucleotides are composed of nucleotide analogs that have been chemically modified to improve stability, half-life, or specificity or affinity for a target receptor, relative to a DNA or RNA counterpart. The chemical modifications include chemical modification of nucleobases, sugar moieties, nucleotide linkages, or combinations thereof. As used herein ‘modified nucleotide” or “chemically modified nucleotide” defines a nucleotide that has a chemical modification of one or more of the heterocyclic base, sugar moiety or phosphate moiety constituents. In certain embodiments, the charge of the modified nucleotide is reduced compared to DNA or RNA oligonucleotides of the same nucleobase sequence. For example, the oligonucleotide can have low negative charge, no charge, or positive charge.

[0251] Typically, nucleoside analogs support bases capable of hydrogen bonding by Watson-Crick base pairing to standard polynucleotide bases, where the analog backbone presents the bases in a manner to permit such hydrogen bonding in a sequence-specific fashion between the oligonucleotide analog molecule and bases in a standard polynucleotide (e.g., single-stranded RNA or single-stranded DNA). In certain embodiments, the analogs have a substantially uncharged, phosphorus containing backbone.

### Mucosal-Associated Invariant T-cell (MAIT) Ligands

[0252] In some embodiments, the amphiphilic ligand conjugate cargo is a ligand for a MAIT cell. The ligand for a MAIT cell is capable of binding to a major histocompatibility complex class I-related protein.

[chemical structure]

In some embodiments, the ligand for a MAIT cell is a small molecule metabolite. In some embodiments, the ligand for a MAIT cell is a vitamin B (e.g., riboflavin) metabolite. For example, the vitamin B metabolite may be 5-(2-oxopropylideneamino)-6-d-ribitylaminouracil (5-OP-RU), 5-(2-oxoethylideneamino)-6-D-ribitylaminouracil (5-OE-RU), 6,7-dimethyl-8-D-ribityllumazine (RL-6,7-diMe), 7-hydroxy-6-methyl-8-D-ribityllumazine (RL-6-Me-7-OH), 6-hydroxymethyl-8-D-ribityl-lumazine, 6-(1H-indol-3-yl)-7-hydroxy-8-ribityllumazine, 6-(2-carboxyethyl)-7-hydroxy8-ribityllumazine. In some embodiments, ligand for a MAIT cell is valine-citrulline-p-aminobenzyl carbamate modified ligand. In some embodiments, the MAIT ligand may be a 5-amino-6-D-ribityl aminouracil (5-A-RU) prodrug. For example, the MAIT ligand may be a valine-citrulline-p-aminobenzyl carbamate modified 5-A-RU. In some embodiments, the MAIT ligand has the structure of Compound A, wherein R is a fluorenylmethyloxycarbonyl protecting group.

[0253] In some embodiments, the ligand for a MAIT cell is a drug metabolite. For example, the drug metabolite may be benzobromarone, chloroxine, diclofenac, 5-hydroxy diclofenac, 4-hydroxy diclofenac, floxuridine, galangin, menadione sodium bisulfate, mercaptopurine, tetrahydroxy-1,4-quinone hydrate.

### Amphiphilic Ligand Conjugate Cargos

[0254] In some embodiments, the amphiphilic ligand conjugate cargo is an antigenic protein, polypeptide, peptide, or epitope, such as a tumor-associated antigen or portion thereof (e.g., an epitope). In some embodiments, the amphiphilic ligand conjugate binds to a T cell receptor. Accordingly, the methods and compositions described herein utilize an amphiphilic ligand conjugate that binds to a T cell receptor expressing cell.

[0255] The peptide can be 2-100 amino acids, including for example, 5 amino acids, 10 amino acids, 15 amino acids, 20 amino acids, 25 amino acids, 30 amino acids, 35 amino acids, 40 amino acids, 45 amino acids, or 50 amino acids. In some embodiments, a peptide can be greater than 50 amino acids. In some embodiments, the peptide can be >100 amino acids.

[0256] A protein/peptide can be linear, branched, or cyclic. The peptide can include D amino acids, L amino acids, or a combination thereof. The peptide or protein can be conjugated to the polar block or lipid at the N-terminus or the C-terminus of the peptide or protein.

[0257] The protein or polypeptide can be any protein or peptide that can induce or increase the ability of the immune system to develop antibodies and T cell responses to the protein or peptide.

[0258] A T cell receptor ligand of an amphiphilic ligand conjugate described herein can be a tumor associated antigen.

### Cancer and Tumor-Associated Antigens

[0259] In some embodiments, the amphiphilic ligand conjugate described herein includes a protein, polypeptide or peptide. The protein, polypeptide or peptide may include a post-translational modification, for example, glycosylation, ubiquitination, phosphorylation, nitrosylation, methylation, acetylation, amidation, hydroxylation, sulfation, or lipidation. The peptide may be between 3 amino acids and 50 amino acids in length. For example, the peptide may be 3, 4, 5, 6, 7, 8, 9, 10, 11, 12, 13, 14, 15, 16, 17, 18, 19, 20, 21, 22, 23, 24, 25, 26, 27, 28, 29, 30, 31, 32, 33, 34, 35, 36, 37, 38, 39, 40, 41, 42, 43, 44, 45, 46, 47, 48, 49, or 50 amino acids in length.

[0260] In some embodiments, the protein, polypeptide, or peptide is an antigen. For example, the antigen may be a cancer antigen e.g., a tumor-associated antigen. In some embodiments, the antigen is an antigen that has been identified to play a role in cancer. In particular embodiments, the antigen has a polypeptide sequence having at least 85% sequence identity to the sequence of any one of SEQ ID NOs: 1-97 or 1125-1183. In some embodiments, the antigen includes the sequence any one of SEQ ID NOs: 1-97 or 1125-1183, or includes Ganglioside G2 or Ganglioside G3. In other embodiments, the antigen consists of the sequence of any one of SEQ ID NOs: 1-97 or 1125-1183.

[0261] A cancer antigen is an antigen that is typically expressed preferentially by cancer cells (i.e., it is expressed at higher levels by cancer cells than by non-cancer cells) and in some instances it is expressed solely by cancer cells. In some embodiments, the cancer antigen is a tumor-associated antigen. The cancer antigen may be expressed within a cancer cell or on the surface of the cancer cell. The cancer antigen can be, but is not limited to, any one of Human papillomavirus (HPV) E6 protein (e.g., HPV-6 E6 protein (SEQ ID NO: 1172), HPV-11 E6 protein (SEQ ID NO: 1171), HPV-16 E6 protein (SEQ ID NO: 1169), or an HPV-18 E6 protein (SEQ ID NO: 1170)), HPV E7 protein (e.g., HPV-6 E7 protein (SEQ ID NO: 1173), HPV-11 E7 protein (SEQ ID NO: 1174), HPV-16 E7 protein (SEQ ID NO: 1175), or an HPV-18 E7 protein (SEQ ID NO: 1176)), Kirsten rat sarcoma (mKRAS) (SEQ ID NO: 1177) (e.g., G12A, G12C, G12D, G12E, G12F, G12H, G121, G12K, G12L, G12M, G12N, G12P, G12Q, G12R, G12S, G12T, G12V, G12W, G12Y, G13C, G13D, Q61A, Q61C, Q61E, Q61F, Q61G, Q61H, Q611, Q61K, Q61L, Q61M, Q61N, Q61N, Q61P, Q61R, Q61T, Q61V, and Q61W variants), Wilms tumor 1 (WT-1) (SEQ ID NO: 19), New York Esophageal Squamous Cell Carcinoma (NYESO) (SEQ ID NO: 9), Mucin 1 (MUC1) (SEQ ID NO: 67), Epidermal growth factor receptor (EGFR) (SEQ ID NO: 1125), Epidermal growth factor receptor variant III (EGFRviii), Phosphoinositide 3-kinase (PI3K) (SEQ ID NO: 1126), Latent membrane protein 2 (LMP2) (SEQ ID NO: 17), Receptor tyrosine-protein kinase erbB-2 (HER-2/neu) SEQ ID NO: 70), Melanoma antigen A3 (MAGE A3) (SEQ ID NO: 12), p53 wild-type (SEQ ID NOS: 86 and 89), p53 mutant, Prostate-specific membrane antigen (PSMA) (SEQ ID NO: 1127), Ganglioside G2 (GD2) (PubChem CID 6450346), Ganglioside G3 (GD3) (PubChem CID 20057323), Carcinoembryonic antigen (CEA) (SEQ ID NO: 1128), Melanoma antigen recognized by T cells (MelanA/MART-1) (SEQ ID NO: 8), Glycoprotein 100 (gp100) (SEQ ID NO: 1129), Proteinase3 (SEQ ID NO: 1130), Breakpoint cluster region protein-Tyrosine protein kinase (bcr-abl) (SEQ ID NO: 1131), Tyrosinase (SEQ ID NOS: 11 and 25), Survivin (SEQ ID NO: 1132), Prostate-specific antigen (PSA) (SEQ ID NO: 1133), human Telomerase reverse transcriptase (hTERT) (SEQ ID NO: 1134), Ephrin type-A receptor 2 (EphA2) (SEQ ID NO: 1135), Pancreatitis associated protein (PAP) (SEQ ID NO:1136), Mucolipidaryl hydrocarbon receptor-interacting protein (ML-AIP) (SEQ ID NO: 1178), Alpha fetoprotein (AFP) (SEQ ID NO: 1137), Epithelial cell adhesion molecule (EpCAM) (SEQ ID NO: 1138), ETS-related gene (ERG) (SEQ ID NO: 1139) (e.g., TMOPRSS2 ETS fusion), NA17 (SEQ ID NO: 1140), Paired Box 3 (PAX3) (SEQ ID NO: 1141), Anaplastic lymphoma kinase (ALK) (SEQ ID NO: 1142), androgen receptor (SEQ ID NO: 1143), Cyclin B (SEQ ID NO: 1144), N-myc proto-oncogene protein (MYCN) (SEQ ID NO: 1145), Rho protein coding (RhoC) (SEQ ID N: 1146), Tyrosinase-related protein-2 (TRP-2) (SEQ ID NO: 1147), Mesothelin (SEQ ID NO: 1148), Prostate stem cell antigen (PSCA) (SEQ ID NO: 1149), Melanoma antigen A1 (MAGE A1) (SEQ ID NO: 15), Cytochrome P450 Family 1 Subfamily B Member 1 (CYP1 B1) (SEQ ID NO: 1150), Placenta-specific protein 1 precursor (PLAC1) (SEQ ID NO: 1151), Monosialodihexosylganglioside (GM3), Brother of regulator of imprinted sites (BORIS) (SEQ ID NO: 1152), Tenascin (Tn) (SEQ ID NO: 1153), Globohexasylceraminde (GloboH), Translocation-Ets-leukemia virus protein-6—acute myeloid leukemia 1 protein (ETV6-AML) (SEQ ID NO: 1154), NY breast cancer antigen 1 (NY-BR-1) (SEQ ID NO: 1179), Regulator of G protein signaling 5 (RGS5) (SEQ ID NO: 1155), Squamous cell carcinoma antigen recognized by T cells 3 (SART3) (SEQ ID NO: 1156), Salmonella enterotoxin (STn) (SEQ ID NO: 1157), Carbonic Anhydrase IX (SEQ ID NO: 42), Paired box gene 5 (PAXS) (SEQ ID NO: 1158), Cancer testis antigen (OY-TES1) (SEQ ID NO: 1159), Tyrosine-protein kinase Lck (LCK) (SEQ ID NO: 1160), human high molecular weight-melanoma associated antigen (HMWMAA) (SEQ ID NO: 1180), A-kinase anchoring protein 4 (AKAP-4) (SEQ ID NO: 1161), Protein SSX2 (SSX2) (SEQ ID NO: 88), X-antigen family member 1 (XAGE-1) (SEQ ID NO: 1162), B7 homolog 3 (B7H3) (SEQ ID NO: 1163), Legumain (SEQ ID NO: 1164), Tyrosine-protein kinase receptor (Tie 2) (SEQ ID NO: 1165), P antigen family member 4 (Page4) (SEQ ID NO: 1166), Vascular endothelial growth factor receptor 2 (VEGFR2) (SEQ ID NO: 1167), Melanoma-cancer testis antigen 1 (MAD-CT-1) (SEQ ID NO: 1182), Fibroblast activation protein (FAP) (SEQ ID NO: 1181), Platelet derived growth factor receptor beta (PDGFR-B) (SEQ ID NO: 1168), Melanoma-cancer testis antigen 2 (MAD-CT-2) (SEQ ID NO: 1183).

[0262] For example, in lung cancer, several antigens have been identified including Matrix protein 1 from Influenza A virus (SEQ ID NO: 1), Epstein-Barr nuclear antigen 3 from Human herpesvirus 4 (SEQ ID NO: 2), Matrix protein from Human respiratory syncytial virus B1 (SEQ ID NO: 3), Phospholipid-transporting ATPase ABCA1 (SEQ ID NO: 4), Signal-regulatory protein delta (SEQ ID NO: 5), Mini-chromosome maintenance complex-binding protein (SEQ ID NO: 6), and Fragile X mental retardation 1 neighbor protein (SEQ ID NO: 7).

[0263] In skin cancer, several antigens have been identified including Melanoma antigen recognized by T cells 1 (MART-1) (SEQ ID NO: 8), Autoimmunogenic cancer/testis antigen NY-ESO-1 (LAGE-2) (SEQ ID NO:9), Melanocyte protein PMEL (ME20-M) (SEQ ID NO: 10), Tyrosinase (SK29-AB) (SEQ ID NO: 11), Melanoma-associated antigen 3 (MAGE-3) (SEQ ID NO: 12), Cyclin-dependent kinase 4 (PSK-J3) (SEQ ID NO: 13), Thymosin beta-10 (SEQ ID NO: 14), Melanoma-associated antigen 1 (MAGE-1) (SEQ ID NO: 15).

[0264] In hematologic cancers, several antigens have been identified including Protein Tax-1 (Protein X-LOR) (SEQ ID NO: 16), Latent membrane protein 2 from Human herpesvirus 4 (SEQ ID NO: 17), Myeloblastin (SEQ ID NO: 18), Wilms tumor protein (SEQ ID NO: 19), 65 kDa phosphoprotein (pp65) (SEQ ID NO: 20), Latent membrane protein 1 from Human herpesvirus 4 (LMP-1) (SEQ ID NO: 21), Epstein-Barr nuclear antigen 3 from Human herpesvirus 4 (EBNA-3) (SEQ ID NO: 22), Epstein-Barr nuclear antigen 1 from Human herpesvirus 4 (EBNA-1) (SEQ ID NO: 23), RNA helicase (SEQ ID NO: 24), Tyrosinase (LB24-AB) (SEQ ID NO: 25), Envelope glycoprotein gp62 (gp46) (SEQ ID NO: 26), Rho GTPase-activating protein 45 (SEQ ID NO: 27), Unconventional myosin-Ig (SEQ ID NO: 28), Transferrin receptor protein 1 (TfR1) (SEQ ID NO: 29), ETS translocation variant 5 (SEQ ID NO: 30), E3 ubiquitin-protein ligase Mdm2 (SEQ ID NO: 31), U1 small nuclear ribonucleoprotein 70 kDa (snRNP70) (SEQ ID NO: 32), Cell division cycle-associated 7-like protein (Protein JPO) (SEQ ID NO: 33), Serine/threonine-protein kinase pim-1 (SEQ ID NO: 34), Death-associated protein kinase 2 (DAP kinase 2) (SEQ ID NO: 35), HTLV-1 basic zipper factor (HBZ) (SEQ ID NO: 36), RNA polymerase II subunit A C-terminal domain phosphatase (SEQ ID NO: 37), B-lymphocyte surface antigen B4 (SEQ ID NO: 38), Hyaluronan mediated motility receptor (SEQ ID NOL: 39), Perilipin-2 (SEQ ID NO: 40), Preferentially expressed antigen of melanoma (SEQ ID NO: 41), Carbonic anhydrase (SEQ ID NO: 42), Ras-specific guanine nucleotide-releasing factor 1 (Ras-GRF1) (SEQ ID NO: 43), Tumor protein p53-inducible protein 11 (SEQ ID NO: 44), E3 ubiquitin-protein ligase Mdm2 (SEQ ID NO: 45), Vesicle-associated membrane protein 3 (SEQ ID NO: 46), Protein mono-ADP-ribosyltransferase PARP3 (SEQ ID NO: 47), ATP-binding cassette sub-family A member 6 (SEQ ID NO:48), B-lymphocyte antigen CD19 (SEQ ID NO: 49), Dynamin-binding protein (SEQ ID NO: 50), Pro-cathepsin H (SEQ ID NO: 51), Transferrin receptor protein 1 (TfR1) (SEQ ID NO: 52), Transmembrane emp24 domain-containing protein 4 (SEQ ID NO: 53), Fibromodulin (SEQ ID NO: 54), B-lymphocyte antigen CD20 (SEQ ID NO: 55), Zinc finger protein 216 (SEQ ID NO: 56), Integrator complex subunit 13 (SEQ ID NO: 57), Cadherin EGF LAG seven-pass G-type receptor 1 (hFmi2) (SEQ ID NO: 58), Melanoma antigen preferentially expressed in tumors (SEQ ID NO: 59), Dmx-like 1 (SEQ ID NO: 60), Baculoviral IAP repeat-containing protein 5 (SEQ ID NO: 61), Vesicle-associated membrane protein 3 (SEQ ID NO: 62), B-lymphocyte antigen CD19 (SEQ ID NO: 63), Interleukin-4 receptor subunit alpha (SEQ ID NO: 64), Cyclin-dependent kinase 4 (SEQ ID NO: 65), Circadian clock protein PASD1 (SEQ ID NO: 66), Mucin-1 (SEQ ID NO: 67), Inactive tyrosine-protein kinase transmembrane receptor ROR1 (SEQ ID NO: 68),

[0265] In brain cancer, the antigen Protein E7 from Human papillomavirus type 45 (SEQ ID NO: 69) has been identified.

[0266] In liver cancer, several antigens have been identified including Receptor tyrosine-protein kinase erbB-2 (SEQ ID NO: 70), Protein 13 (SEQ ID NO: 71), Intestinal protein OCI-5 (MXR7) (SEQ ID NO: 72), Chromodomain-helicase-DNA-binding protein 3 (SEQ ID NO: 73), RNA-directed RNA polymerase L (SEQ ID NO: 74), Programmed cell death protein 7 (SEQ ID NO: 75), and Interleukin-1 beta (SEQ ID NO: 76). In kidney cancer, several antigens have been identified including Protein enabled homolog (SEQ ID NO: 77), Myotubularin (SEQ ID NO: 78), Arachidonate-CoA ligase (VLCS-3) (SEQ ID NO: 79), Tyrosine-protein phosphatase non-receptor type 12 (SEQ ID NO: 80), Cytochrome c oxidase assembly factor 6 homolog (SEQ ID NO: 81), Methionine synthase reductase (SEQ ID NO: 82), Serine/threonine-protein kinase (SMG-1) (SEQ ID NO: 83), and EF-hand calcium-binding domain-containing protein 13 (SEQ ID NO: 84).

[0267] In breast cancer and thoracic cancer, several antigens have been identified including Mammaglobin-A (SEQ ID NO: 85), Cellular tumor antigen p53 (SEQ ID NO: 86), Receptor tyrosine-protein kinase erbB-2 (SEQ ID NO: 87), Protein SSX2 (SEQ ID NO: 88), Cellular tumor antigen p53 (SEQ ID NO: 89), and Heat shock 70 kDa protein 1 B (HSPA1 B) (SEQ ID NO: 90).

[0268] In cervical cancer, several antigens have been identified including Protein E7 from Alphapapillomavirus (SEQ ID NO: 91), Protein E6 from Alphapapillomavirus (SEQ ID NO: 92), Major capsid protein L1 from Human papillomavirus 16 (SEQ ID NO: 93), Replication protein E1 from Human papillomavirus 16 (SEQ ID NO: 94), Regulatory protein E2 from Human papillomavirus 16 (SEQ ID NO: 95), and Non-structural protein 2a from Human coronavirus OC43 (SEQ ID NO: 96).

[0269] In rectal cancer, the antigen Protein E7 from Alphapapillomavirus (SEQ ID NO: 91) has been identified.

[0270] In bladder cancer, the antigen C-terminal-binding protein 1 (SEQ ID NO: 97) has been identified.

[0271] In stomach cancer, the antigen the antigen Protein E7 from Alphapapillomavirus (SEQ ID NO: 91) has been identified.

[0272] The peptide included in the amphiphilic conjugate may be an epitope of an antigen. An antigen includes one or more epitopes that is recognized, targeted, or bound by a given antibody or T cell receptor. An epitope may be a linear epitope, for example, a contiguous sequence of nucleic acids or amino acids. An epitope may also be a conformational epitope, for example, an epitope that contains amino acids that form an epitope in the folded conformation of the protein. A conformational epitope may contain non-contiguous amino acids from a primary amino acid sequence. As another example, a conformational epitope may include nucleic acids that form an epitope in the folded conformation of an immunogenic sequence based on its secondary structure or tertiary structure. The epitope of the antigen may be a biologically active polypeptide fragment of the antigen, for example the epitope may be any length shorter than the antigen. In some embodiments, the epitope may include between 50 and 3 (e.g., 49, 48, 47, 46, 45, 44, 43, 42, 41, 42, 41, 39, 38, 37, 36, 35, 34, 33, 32, 31, 30, 29, 28, 27, 26, 25, 24, 23, 22, 21, 20, 19, 18, 17, 16, 15, 14, 13, 12, 11, 10, 9, 8, 7, 6, 5, 4, or 3) amino acid residues, between 25 and 5 (e.g., 24, 23, 22, 21, 20, 19, 18, 17, 16, 15, 14, 13, 12, 11, 10, 9, 8, 7, 6, or 5) amino acids residues, or between 15 and 6 (e.g., 14, 13, 12, 11, 10, 9, 8, 7, or 6) in length of the antigen.

[0273] In some embodiments, the epitope may be a fragment of the sequence of any one SEQ ID NOs: 1-97 or 1125-1183, or a fragment of Ganglioside G2 or Ganglioside G3. Further examples of epitopes that may be included in an amphiphilic lipid conjugate include any one of the epitopes described in Table 1. In some embodiments, the epitope included in the amphiphilic conjugate includes a polypeptide sequence having at least 85% (e.g., at least 86%, at least 87%, at least 88%, at least 89%, at least 90%, at least 95%, or 100%) sequence identity to the sequence of any one of SEQ ID NOs: 98-1123. In some embodiments, the peptide included in the amphiphilic conjugate may include any one of the epitopes described in Table 1, including any one of the sequences of SEQ ID NOs: 98-1123.

TABLE 1
Epitopes derived from tumor associated antigens

| SEQ | | | SEQ | | |
|---|---|---|---|---|---|
| ID | | | ID | | |
| NO: | Sequence | Origin | NO: | Sequence | Origin |
| 98 | GLPTDTIRKEFRTRM | 1-phosphatidylinositol 4,5- | 612 | ISEYRHYCY | Protein E6 |
| | | bisphosphate | | | |
| | | phosphodiesterase beta-4 | | | |
| | | isoform X10 [Homo | | | |
| | | sapiens] | | | |
| 99 | LFGLGKDEGWGPPAR | 5′-nucleotidase, cytosolic | 613 | KLPDLCTEL | protein E6 |
| | | IIIB | | | |
| 100 | TFNCHHARPWHNQF | 5-hydroxytryptamine | 614 | KLPQLCTEL | Protein E6 |
| | V | receptor 3D isoform 3 | | | |
| | | precursor [Homo sapiens] | | | |
| 101 | NLVPMVATV | 65 kDa lower matrix | 615 | TIHDIILECV | Protein E6 |
| | | phosphoprotein | | | |
| 102 | TPRVTGGGAM | 65 kDa lower matrix | 616 | VYDFAFRDL | Protein E6 |
| | | phosphoprotein | | | |
| 103 | FEGTEMWNPNRELSE | Acetylcholinesterase (Yt | 617 | DKKQRFHNIRG | Protein E6 |
| | | blood group) [Homo | | RWTGRCMSCC | |
| | | sapiens] | | RSSRTRRETQL | |
| 104 | AIGIGAYLV | Acetyl-CoA carboxylase 2 | 618 | FRDLCIVYRDG | Protein E6 |
| | | | | NPYAVCDKCLK | |
| | | | | FYSKISEYRHY | |
| 105 | SVQGIIIYR | ADP/ATP translocase 2 | 619 | KLPQLCTELQT | Protein E6 |
| | | | | TIHDIILECVYCK | |
| | | | | QQLLRREV | |
| 106 | VDGIGILTI | ADP-ribose | 620 | MHQKRTAMFQ | Protein E6 |
| | | pyrophosphatase | | DPQERPRKLPQ | |
| | | | | LCTELQTTIHDI | |
| 107 | SASVQRADTSL | AN1-type zinc finger | 621 | RCINCQKPLCP | Protein E6 |
| | | protein 5 | | EEKQRHLDKKQ | |
| | | | | RFHNIRGRWT | |
| 108 | ATIIDILTK | annexin I | 622 | EKQRHLDKKQR | Protein E6 |
| | | | | FHNI | |
| 109 | ILEGIGILAV | Anoctamin-3 | 623 | CVYCKQQLLRR | Protein E6 |
| | | | | EVYDFAFRDLCI | |
| | | | | VYRDGNPYA | |
| 110 | ILEGIGILSV | anoctamin-4 isoform 1 | 624 | ELQTTIHDIILEC | Protein E6 |
| | | | | VY | |
| 111 | MNAAVTFANCALGRV | aquaporin-7 isoform 4 | 625 | RDLCIVYRDGN | Protein E6 |
| | | [Homo sapiens] | | PYAVCDKCLKF | |
| | | | | YSKISEYRHY | |
| 112 | PWRKFPVYVLGQFLG | aquaporin-7 isoform 4 | 626 | VYDFAFRDLCIV | Protein E6 |
| | | [Homo sapiens] | | YRD | |
| 113 | INCLSSPNEETVLSA | armadillo repeat- | 627 | FAFKDLCIVY | Protein E6 |
| | | containing protein 7 | | | |
| | | isoform 1 [Homo sapiens] | | | |
| 114 | STAYPAPMRRRCCLP | armadillo repeat- | 628 | FAFSDLYVVY | Protein E6 |
| | | containing protein 7 | | | |
| | | isoform 2 [Homo sapiens] | | | |
| 115 | ILDEKPVII | ATP-binding cassette sub- | 629 | FVFADLRIVY | Protein E6 |
| | | family A member 6 | | | |
| 116 | VLNGTVHPV | ATP-binding cassette sub- | 630 | VAFTEIKIVY | Protein E6 |
| | | family B member 5 | | | |
| 117 | ALIGGPPV | ATP-binding cassette | 631 | DFAFRDLCIVYR | Protein E6 |
| | | transporter A1 | | DGNPYAVCDK | |
| 118 | HIENFSDIDMGE | ATP-dependent RNA | 632 | DKCLKFYSKISE | Protein E6 |
| | | helicase DDX3Y | | YRHYCYSLYG | |
| 119 | VALKPQERVEKRQTP | autism susceptibility gene | 633 | DPQERPRKLPQ | Protein E6 |
| | | 2 protein isoform X9 | | LCTELQTTIHD | |
| | | [Homo sapiens] | | | |
| 120 | TLGEFLKL | Baculoviral IAP repeat- | 634 | HDIILECVYCKQ | Protein E6 |
| | | containing protein 5 | | QLLRREVYDF | |
| 121 | QLCPICRAPV | Baculoviral IAP repeat- | 635 | KQQLLRREVYD | Protein E6 |
| | | containing protein 7 | | FAFRDLCIVYR | |
| 122 | AFLGERVTL | BARF1 protein | 636 | RFHNIRGRWTG | Protein E6 |
| | | | | RCMSCCRSSR | |
| | | | | T | |
| 123 | FLGERVTLT | BARF1 protein | 637 | YRDGNPYAVCD | Protein E6 |
| | | | | KCLKFYSKISE | |
| 124 | KLGPGEEQV | BARF1 protein | 638 | CLKFYSKISEYR | Protein E6 |
| | | | | HYCYSLYGTTL | |
| | | | | EQQYNKPLCD | |
| 125 | RFIAQLLLL | BARF1 protein | 639 | DLFVVYRDSIPH | Protein E6 |
| | | | | AACHKCIDFY | |
| 126 | TLTSYWRRV | BARF1 protein | 640 | FYSRIRELRHYS | Protein E6 |
| | | | | DSVYGDTLEK | |
| 127 | FLLAMTSLR | BcRF1 protein | 641 | GTTLEQQYNKP | Protein E6 |
| | | | | LCDLLIRCINC | |
| 128 | RPKSNIVLL | B-lymphocyte antigen | 642 | KQRHLDKKQRF | Protein E6 |
| | | CD20 | | HNIRGRWTGRC | |
| 129 | RPKSNIVL | B-lymphocyte antigen | 643 | PLCDLLIRCINC | Protein E6 |
| | | CD20 | | QKPLCPEEKQ | |
| 130 | GLCTLVAML | BMLF1 protein | 644 | QERPRKLPQL | Protein E6 |
| 131 | LLGIGILVL | Bone marrow stromal | 645 | QRFHNIRGRW | Protein E6 |
| | | antigen 2 | | | |
| 132 | LLLGIGILVL | Bone marrow stromal | 646 | RWTGRCMSCC | Protein E6 |
| | | antigen 2 | | | |
| 133 | VQLRGRAQGGGALR | brain-specific serine | 647 | SSRTRRETQL | Protein E6 |
| | A | protease 4 precursor | | | |
| | | [Homo sapiens] | | | |
| 134 | HVYDGKFLAR | butyrylcholinesterase | 648 | AFRDLCIVYRD | Protein E6 |
| | | p. Val204Asp splice variant | | GNPY | |
| 135 | GLLSLEEEL | bZIP factor | 649 | HLDKKQRFHNI | Protein E6 |
| | | | | RGRW | |
| 136 | ARRRRRAEKKAADVA | bZIP factor | 650 | FAFRDLCIVYR | Protein E6 |
| | RRKQE | | | | |
| 137 | RRRAEKKAADVA | bZIP factor | 651 | MLDLQPETT | Protein E7 |
| 138 | RAKFKQLL | BZLF1 | 652 | YILDLQPETT | Protein E7 |
| 139 | SPTSSRTSSL | cadherin EGF LAG seven- | 653 | YVLDLQPEAT | Protein E7 |
| | | pass G-type receptor 1 | | | |
| | | precursor | | | |
| 140 | ARAAAAAAFEIDPRS | cadherin EGF LAG seven- | 654 | LEDLLMGTLGIV | Protein E7 |
| | | pass G-type receptor 3 | | CPICSQKP | |
| | | precursor [Homo sapiens] | | | |
| 141 | LLAALVQDYL | calcitonin | 655 | FQQLFLNTL | Protein E7 |
| 142 | CMLGTYTQDF | calcitonin isoform CT | 656 | QLFLNTLSFV | Protein E7 |
| | | preproprotein [Homo | | | |
| | | sapiens] | | | |
| 143 | FLALSILVL | calcitonin isoform CT | 657 | ASDLRTIQQLLM | Protein E7 |
| | | preproprotein [Homo | | GTV | |
| | | sapiens] | | | |
| 144 | GNLSTCMLGTYTQDF | calcitonin isoform CT | 658 | LRTIQQLLMGTV | Protein E7 |
| | | preproprotein [Homo | | NIV | |
| | | sapiens] | | | |
| 145 | MGFQKFSPFLALSIL | calcitonin isoform CT | 659 | MHGDTPTLHEY | Protein E7 |
| | | preproprotein [Homo | | MLDL | |
| | | sapiens] | | | |
| 146 | VLLQAGSLHA | calcitonin isoform CT | 660 | HVDIRTLEDLLM | Protein E7 |
| | | preproprotein [Homo | | GTL | |
| | | sapiens] | | | |
| 147 | SLLMWITQC | Cancer/testis antigen 1 | 661 | DLYCYEQLNDS | Protein E7 |
| | | | | SEEEDEIDGPA | |
| 148 | WITQCFLPVFLAQPP | Cancer/testis antigen 1 | 662 | HYNIVTFCCKC | Protein E7 |
| | SGQRR | | | DSTLRLCVQST | |
| 149 | QLSLLMWIT | Cancer/testis antigen 1 | 663 | IPVDLLCHEQLS | Protein E7 |
| | | | | DSEEENDEID | |
| 150 | APRGPHGGAASGL | Cancer/testis antigen 1 | 664 | IRTLEDLLMGT | Protein E7 |
| 151 | EFTVSGNIL | Cancer/testis antigen 1 | 665 | MHGPKATLQDI | Protein E7 |
| | | | | VLHLEPQNEIP | |
| 152 | LPVPGVLLKEFTVSG | Cancer/testis antigen 1 | 666 | TPTLHEYMLDL | Protein E7 |
| | NILTI | | | QPET | |
| 153 | RGPESRLLEFYLAMP | Cancer/testis antigen 1 | 667 | EMSALLARRRR | Protein enabled |
| | FATPM | | | IAEK | homolog |
| 154 | RLLEFYLAMPFATPM | Cancer/testis antigen 1 | 668 | RVQEAVESMVK | protein |
| | EAELA | | | | FAM136A |
| 155 | VLLKEFTVSGNILTIRL | Cancer/testis antigen 1 | 669 | RYYVGHKGKF | Protein mago |
| | TAA | | | | nashi homolog 2 |
| 156 | DIAGIGLKTV | CAND2 protein | 670 | KIFYVYMKRKY | Protein SSX2 |
| | | | | EAMT | |
| 157 | GAGIGVLTA | carbohydrate-binding | 671 | KASEKIFYV | Protein SSX2 |
| | | protein [Clostridium sp. | | | |
| | | E02] | | | |
| 158 | HLSTAFARV | Carbonic anhydrase 9 | 672 | ATFSSSHRYHK | protein transport |
| | | precursor | | | protein Sec31A |
| | | | | | isoform 7 |
| 159 | LPSQAFEYILYNKG | cathepsin H | 673 | LLHGFSFHL | Protein-serine 0- |
| | | | | | palmitoleoyltran |
| | | | | | sferase |
| | | | | | porcupine |
| 160 | KPGVIFLTKRSRQV | C-C motif chemokine 3 | 674 | ETDPVNHMV | protocadherin |
| | | precursor | | | Fat 2 precursor |
| | | | | | [Homo sapiens] |
| 161 | KVSAVTLAY | CD19 differentiation | 675 | GINQTTGALYLR | protocadherin- |
| | | antigen | | VDS | 16 precursor |
| | | | | | [Homo sapiens] |
| 162 | KLMSPKLYVW | CD19 differentiation | 676 | GLGIGIASM | Proton myo- |
| | | antigen | | | inositol |
| | | | | | cotransporter |
| 163 | VEGSGELFRW | CD19 differentiation | 677 | ALLKDTVYT | proto-oncogene |
| | | antigen | | | PIM1 |
| 164 | STATHSPATTSHGNA | CD68 [Homo sapiens] | 678 | NLVHGPPAPPQ | PSD protein, |
| | | | | VGAD | partial [Homo |
| | | | | | sapiens] |
| 165 | VTVHPTSNSTATSQG | CD68 [Homo sapiens] | 679 | ALYSGVHKK | putative adapter |
| | | | | | and scaffold |
| | | | | | protein |
| 166 | AVGIGIAVV | CD9 antigen | 680 | QLLEGLGFTLTV | PUTATIVE |
| | | | | VPE | PSEUDOGENE: |
| | | | | | RecName: |
| | | | | | Full=Putative |
| | | | | | serpin A13; |
| | | | | | Flags: Precursor |
| 167 | YGYDNVKEY | CDCA7L protein | 681 | EFPVRQAAAIYL | RANBP8 [Homo |
| | | | | K | sapiens] |
| 168 | LQREYASVKEENERL | CDK5 regulatory subunit | 682 | GGGPDGPLYKV | rap1 GTPase- |
| | | associated protein 2 | | SVTA | activating |
| | | [Homo sapiens] | | | protein 1 isoform |
| | | | | | X13 [Homo |
| | | | | | sapiens] |
| 169 | MEVSGCPTPAGQS | CEA cell adhesion | 683 | AAANIIRTL | RASGRF1 |
| | | molecule 18 | | | protein |
| 170 | RTIAPIIGR | cell division cycle 5-like | 684 | LGVIGLVAL | Receptor |
| | | protein | | | expression- |
| | | | | | enhancing |
| | | | | | protein 5 |
| 171 | STPPPGATRV | Cellular tumor antigen p53 | 685 | IISAVVGIL | Receptor |
| | | | | | tyrosine-protein |
| | | | | | kinase erbB-2 |
| | | | | | precursor |
| 172 | HYNYMCNSSCMGGM | Cellular tumor antigen p53 | 686 | KIFGSLAFLPES | Receptor |
| | NRRPILTIITL | | | FDGDPA | tyrosine-protein |
| | | | | | kinase erbB-2 |
| | | | | | precursor |
| 173 | HGLSHSLRQISSQLS | centrosomal protein of 164 | 687 | HPAATHTKAV | Regulatory |
| | | kDa isoform X20 [Homo | | | protein E2 |
| | | sapiens] | | | |
| 174 | RFEEKHAYF | CGI-201 protein | 688 | QIKVRVDMV | regulatory |
| | | | | | protein IE1 |
| 175 | MQLMPFGCLL | Chain A, Epidermal | 689 | TLLQQYCLYL | Replication |
| | | Growth Factor Receptor | | | protein E1 |
| 176 | LIMQLMPFGCL | Chain A, Epidermal | 690 | KSEGEEAQEVE | retinitis |
| | | Growth Factor Receptor | | GETQ | pigmentosa 1- |
| | | | | | like protein 1 |
| | | | | | [Homo sapiens] |
| 177 | YPFKPPKV | Chain B, E2~ubiquitin- | 691 | SSLSLFFRK | retinoblastoma- |
| | | Hect | | | like protein 2 |
| 178 | ETGPEAERLEQLESG | CHL1 protein [Homo | 692 | VRRCLPLCALTL | Rhesus |
| | | sapiens] | | EAA | polypeptide |
| | | | | | RhVIII [Homo |
| | | | | | sapiens] |
| 179 | AVMRWGMPP | Chromodomain-helicase- | 693 | RTNWPNTGK | RINT1 protein, |
| | | DNA-binding protein 3 | | | partial |
| 180 | ILFSLQPGLLRDW | Chromosome 7 open | 694 | GRAPQVLVL | RNA helicase |
| | | reading frame 67 [Homo | | | Il/Gu protein |
| | | sapiens] | | | |
| 181 | MFTLTGCRLVEKT | cilia- and flagella- | 695 | TYSPTSPVYTP | RNA |
| | | associated protein 65 | | TSPK | polymerase II |
| | | isoform X7 [Homo | | | largest subunit |
| | | sapiens] | | | [Homo sapiens] |
| 182 | RLWQELSD | circadian clock protein | 696 | GGHDSSSWSH | RNA-binding |
| | | PASD1 | | RYGGG | motif protein, X- |
| | | | | | linked-like-3 |
| | | | | | [Homo sapiens] |
| 183 | ATAGIIGVNR | CLTC protein | 697 | DPSAIGLADPPI | selenoprotein V |
| | | | | PSP | isoform 2 [Homo |
| | | | | | sapiens] |
| 184 | THRPGGKHGRLAGG | coiled-coil domain- | 698 | AVYTPPSVSTH | serine protease |
| | S | containing protein 74B | | QMPR | 3 |
| | | isoform X8 [Homo sapiens] | | | |
| 185 | SSLPGPPGPPGPPGP | Collagen alpha-1 (XVIII) | 699 | GRLILWEAPPL | serine/threonine |
| | | chain | | GAGG | -protein kinase |
| | | | | | Nek8 [Homo |
| | | | | | sapiens] |
| 186 | EVPMCSDPEPRQEV | constitutive coactivator of | 700 | SIYNNLVSFASP | Serine/threonine |
| | P | peroxisome proliferator- | | LVT | -protein kinase |
| | | activated receptor gamma | | | SMG1 |
| | | isoform X2 [Homo | | | |
| | | sapiens] | | | |
| 187 | VTTKKTPPSQPPGNV | Contactin 3 | 701 | LLLELAGVTHV | Signal- |
| | | (plasmacytoma | | | regulatory |
| | | associated) [Homo | | | protein delta |
| | | sapiens] | | | |
| 188 | YLNKEIEEA | CTD (carboxy-terminal | 702 | NLKLKLHSF | Similar to |
| | | domain, RNA polymerase | | | retinoblastoma- |
| | | Il, polypeptide A) | | | binding protein |
| | | phosphatase, subunit 1 | | | 4, partial |
| 189 | ARGGLVDEKALAQAL | C-terminal- | 703 | TRLFPNEFANF | SLIT and NTRK- |
| | KEGRIRGAAL | binding protein | | YNAV | like protein 1 |
| | | 1 | | | precursor [Homo |
| | | | | | sapiens] |
| 190 | ALTPVVVTL | cyclin-dependent kinase 4 | 704 | CISCKLSRQHC | small t antigen |
| | | | | SLKTLKQKN | [Merkel cell |
| | | | | | polyomavirus] |
| 191 | DFGFARTLAAPGDI | cyclin-dependent kinase- | 705 | KLGIGFAKA | sodium channel |
| | | like 3 isoform X10 [Homo | | | alpha subunit |
| | | sapiens] | | | |
| 192 | INFKIERGQLLAV | cystic fibrosis | 706 | FLQEVNVYGV | Solute carrier |
| | | transmembrane | | | family 27 |
| | | conductance regulator | | | member 3 |
| | | [Homo sapiens] | | | |
| 193 | GLGIGALVL | Cytochrome c oxidase | 707 | LIGIGLNLV | Spatacsin |
| | | assembly factor 3 | | | |
| | | homolog, mitochondrial | | | |
| 194 | QWIKYFDKRRDYLKF | Cytochrome c oxidase | 708 | IEELRHLWDLLL | spectrin alpha |
| | | assembly factor 6 | | ELTL | chain, |
| | | homolog | | | erythrocytic 1 |
| | | | | | isoform X4 |
| | | | | | [Homo sapiens] |
| 195 | FSISQLQKNHDMNDE | cytochrome P450 7B1 | 709 | KELRALRKMVS | spermatid- |
| | | isoform 1 [Homo sapiens] | | NMSG | associated |
| | | | | | protein isoform |
| | | | | | X1 [Homo |
| | | | | | sapiens] |
| 196 | AVKRLPLVYCDYHGH | cytosolic | 710 | YTCPLCRAPV | SSA protein SS- |
| | | carboxypeptidase 1 | | | 56 |
| | | isoform X8 [Homo | | | |
| | | sapiens] | | | |
| 197 | MLLDKNIPI | DAPK2 protein | 711 | IMLEGETKL | ssDNA-binding |
| | | | | | phosphoprotein |
| 198 | IAGPGTITL | diaminopimelate | 712 | QQEIDQKRLEF | structural |
| | | decarboxylase | | EKQK | maintenance of |
| | | | | | chromosomes |
| | | | | | protein 1B |
| | | | | | isoform X2 |
| | | | | | [Homo sapiens] |
| 199 | SSSGLHPPK | Dmx-like 1, isoform | 713 | AGRFGQGAHH | suprabasin |
| | | CRA_a | | AAGQA | isoform X3 |
| | | | | | [Homo sapiens] |
| 200 | VTEHDTLLY | DNA processivity factor | 714 | RLFVGSIPK | SYNCRIP |
| | | | | | protein, partial |
| 201 | SSAEPTEHGERTPLA | DPCR1 [Homo sapiens] | 715 | GYDQIMPKK | SYT-SSX |
| | | | | | protein |
| 202 | KPRQSSPQL | dynamin binding protein, | 716 | APLQRSQSL | TBC1 domain |
| | | isoform CRA_b | | | family, member |
| | | | | | 22A, isoform |
| | | | | | CRA b |
| 203 | GLYYVHEGIRTYFVQ | Regulatory protein E2 | 717 | EPGDTALYLCA | T cell receptor |
| | | | | SSQS | beta chain |
| | | | | | variable region, |
| | | | | | partial [Homo |
| | | | | | sapiens] |
| 204 | YLTAPTGCI | Regulatory protein E2 | 718 | ALLTSRLRFIP | Telomerase |
| | | | | | reverse |
| | | | | | transcriptase |
| 205 | DSAPILTAF | Regulatory protein E2 | 719 | EARPALLTSRL | Telomerase |
| | | | | RFIPK | reverse |
| | | | | | transcriptase |
| 206 | ILTAFNSSHK | Regulatory protein E2 | 720 | LLTSRLRF | Telomerase |
| | | | | | reverse |
| | | | | | transcriptase |
| 207 | KSAIVTLTY | Regulatory protein E2 | 721 | LLTSRLRFI | Telomerase |
| | | | | | reverse |
| | | | | | transcriptase |
| 208 | LAVSKNKAL | Regulatory protein E2 | 722 | RPALLTSRLRFI | Telomerase |
| | | | | | reverse |
| | | | | | transcriptase |
| 209 | LQDVSLEVY | Regulatory protein E2 | 723 | GTADVHFER | THO complex |
| | | | | | subunit 4 |
| 210 | LTAPTGCIKK | Regulatory protein E2 | 724 | ASFDKAKLK | thymosin beta- |
| | | | | | 10, partial |
| 211 | NPCHTTKLL | Regulatory protein E2 | 725 | PTKCEVERFTA | thyroglobulin |
| | | | | TSFG | isoform X10 |
| | | | | | [Homo sapiens] |
| 212 | NTTPIVHLK | Regulatory protein E2 | 726 | ESDPIVAQY | Titin |
| 213 | QVILCPTSV | Regulatory protein E2 | | | |
| 214 | RLECAIYYK | E2 | 728 | GDCVQGDWCP | transcriptional |
| | | | | ISGGL | activator Tax |
| 215 | SPEIIRQHL | E2 | 729 | ISGGLCSARLH | transcriptional |
| | | | | RHAL | activator Tax |
| 216 | TLKCLRYRFK | E2 | 730 | LLFGYPVYV | transcriptional |
| | | | | | activator Tax |
| 217 | TLYTAVSST | E2 | 731 | SFHSLHLLF | transcriptional |
| | | | | | activator Tax |
| 218 | VVEGQVDYY | E2 | 732 | VVCMYLYQLSP | transcriptional |
| | | | | PITW | activator Tax |
| 219 | YRFKKHCTL | E2 | 733 | AGQNPASHPPP | transcriptional |
| | | | | DDAE | adapter 1 [Homo |
| | | | | | sapiens] |
| 220 | YYVHEGIRTY | E2 | 734 | RVEYHFLSPYV | transferrin |
| | | | | SPK | receptor protein |
| | | | | | 1 |
| 221 | ALQAIELQL | E2 protein | 735 | NSVIIVDKNGRL | transferrin |
| | | | | V | receptor protein |
| | | | | | 1 |
| 222 | TLQDVSLEV | E2 protein | 736 | ILLGIGIYAL | transmembrane |
| | | | | | and coiled-coil |
| | | | | | domain- |
| | | | | | containing |
| | | | | | protein 2 [Homo |
| | | | | | sapiens] |
| 223 | YICEEASVTV | E2 protein | 737 | LLGIGIYAL | transmembrane |
| | | | | | and coiled-coil |
| | | | | | domain- |
| | | | | | containing |
| | | | | | protein 2 [Homo |
| | | | | | sapiens] |
| 224 | CQDKILTHYENDSTD | E2 protein | 738 | IHSSWDCGLFT | transmembrane |
| | | | | NYSA | channel-like |
| | | | | | protein 8 isoform |
| | | | | | X10 [Homo |
| | | | | | sapiens] |
| 225 | EEASVTVVEGQVDYY | E2 protein | 739 | QLLDQVEQI | transmembrane |
| | | | | | emp24 domain- |
| | | | | | containing |
| | | | | | protein 4 isoform |
| | | | | | 4 |
| 226 | QVILCPTSVFSSNEV | E2 protein | 740 | IMASKGMRHFC | transmembrane |
| | | | | LISE | protein 168 |
| | | | | | isoform X2 |
| | | | | | [Homo sapiens] |
| 227 | TEETQTTIQRPRSEP | E2 protein | 741 | MRHFCLISE | transmembrane |
| | | | | | protein 168 |
| | | | | | isoform X2 |
| | | | | | [Homo sapiens] |
| 228 | VLFYLGQYI | E3 ubiquitin-protein ligase | 742 | IAGLGLLTV | transmembrane |
| | | Mdm2 | | | protein 74B |
| | | | | | isoform 1 |
| 229 | DEKQQHIVY | E3 ubiquitin-protein ligase | 743 | GELIGTLNAAKV | triosephosphate |
| | | Mdm2 | | PAD | isomerase 1 |
| 230 | DEVYQVTVY | E3 ubiquitin-protein ligase | 744 | QVATEGLAK | Tripartite |
| | | Mdm2 | | | terminase |
| | | | | | subunit UL28 |
| | | | | | homolog |
| 231 | PSRHRYGARQPRAR | E3 ubiquitin-protein ligase | 745 | RLARLALVL | Trophoblast |
| | L | RNF126 isoform 1 [Homo | | | glycoprotein |
| | | sapiens] | | | |
| 232 | LGLWRGEEVTLSNPK | E3 ubiquitin-protein ligase | 746 | PNGTSVPRNSS | truncated large |
| | | TRIP12 isoform X5 [Homo | | RTYGTWEDL | T antigen |
| | | sapiens] | | | [Merkel cell |
| | | | | | polyomavirus] |
| 233 | LWTEGMLQMAFHILA | E3 ubiquitin-protein ligase | 747 | MRETSGFTL | trypsin-3 isoform |
| | | UBR1 [Homo sapiens] | | | 3 preproprotein |
| | | | | | [Homo sapiens] |
| 234 | LLSVSTYTSLILLVL | E5 | 748 | AVFDGAQVTSK | tumor protein |
| | | | | | p53 inducible |
| | | | | | protein 11, |
| | | | | | isoform CRA_c |
| 235 | YIIFVYIPL | E5 protein | 749 | YMDGTMSQV | Tyrosinase |
| 236 | FAFRDLCIV | E6 | 750 | MLLAVLYCL | Tyrosinase |
| | | | | | precursor |
| 237 | IILECVYCK | E6 | 751 | YMNGTMSQV | Tyrosinase |
| | | | | | precursor |
| 238 | LLIRCINCQK | E6 | 752 | FQDYIKSYL | Tyrosinase |
| | | | | | precursor |
| 239 | PYAVCDKCL | E6 | 753 | SVYDFFVWL | tyrosinase- |
| | | | | | related protein-2 |
| 240 | TTLEQQYNK | E6 | 754 | PKPVLHMVSSE | Tyrosine-protein |
| | | | | QHSA | phosphatase |
| | | | | | non-receptor |
| | | | | | type 12 |
| 241 | VCDKCLKFY | E6 | 755 | YLAPENGYL | U1 small nuclear |
| | | | | | ribonucleoprotein |
| | | | | | 70 kDa |
| 242 | CPEEKQRHL | E6 | 756 | KMGIGWKPL | Uncharacterized |
| | | | | | protein C2orf71 |
| 243 | QYNKPLCDL | E6 | 757 | HYYVSMDAL | unknown protein |
| | | | | | eluted from |
| | | | | | human MHC |
| | | | | | allele |
| 244 | FAFSDLCIVY | E6 | 758 | KYKDRTNILF | unknown protein |
| | | | | | eluted from |
| | | | | | human MHC |
| | | | | | allele |
| 245 | LKFYSKISEYRHYCY | E6 | 759 | RLPSSADVEF | unknown protein |
| | | | | | eluted from |
| | | | | | human MHC |
| | | | | | allele |
| 246 | AVCDKCLKFY | E6 | 760 | RYNADISTF | unknown protein |
| | | | | | eluted from |
| | | | | | human MHC |
| | | | | | allele |
| 247 | CVYCKQQLLR | E6 | 761 | QEEKSLDPMVY | unnamed |
| | | | | MNDTSPLT | protein product |
| 248 | NPYAVCDKCL | E6 | 762 | TCSCQSSGTSS | unnamed |
| | | | | TSYS | protein product |
| | | | | | [Homo sapiens] |
| 249 | RPRKLPQLCT | E6 | 763 | TIYSLFYSVADR | unnamed |
| | | | | DAPA | protein product |
| | | | | | [Homo sapiens] |
| 250 | YAVCDKCLKF | E6 | 764 | GAIVIERPNVKW | vacuolar protein |
| | | | | S | sorting- |
| | | | | | associated |
| | | | | | protein 4B |
| | | | | | [Homo sapiens] |
| 251 | YGTTLEQQY | E6 | 765 | DIMRVNVDKVL | vesicle- |
| | | | | ERDQKL | associated |
| | | | | | membrane |
| | | | | | protein 3 |
| 252 | CYSLYGTTL | E6 protein | 766 | VDKVLERDQKL | vesicle- |
| | | | | SELDDR | associated |
| | | | | | membrane |
| | | | | | protein 3 |
| 253 | FAFRDLCIVY | E6 protein | 767 | SSVPGVRLL | vimentin |
| 254 | EYRHYCYSL | E6 protein | | NYIDKVR | vimentin |
| 255 | PRKLPQLCTELQTTI | E6 protein | 769 | CQWGRLWQL | WD repeat- |
| | | | | | containing |
| | | | | | protein BING4 |
| 256 | QYNKPLCDLL | E6 protein | 770 | MCQWGRLWQL | WD repeat- |
| | | | | | containing |
| | | | | | protein BING4 |
| 257 | VYDFAFQDL | E6 protein | 771 | CMTWNQMNL | Wilms tumor |
| | | | | | protein |
| 258 | FACYDLCIVY | E6 protein | 772 | RMFPNAPYL | Wilms tumor |
| | | | | | protein |
| 259 | ILIRCIICQ | E6 protein | 773 | SGSGSGPLPSL | zinc finger |
| | | | | FLNS | homeodomain |
| | | | | | protein [Homo |
| | | | | | sapiens] |
| 260 | KCLNEILIR | E6 protein | 774 | LTDHRAHRCPG | zinc finger |
| | | | | GNAK | protein |
| 261 | KVCLRLLSK | E6 protein | 775 | QLTAHKMIHTG | Zinc finger |
| | | | | EKPY | protein 100 |
| | | | | | [Homo sapiens] |
| 262 | GIVCPICSQK | E7 | 776 | ECSECGKVFLE | zinc finger |
| | | | | SAAL | protein 264 |
| | | | | | [Homo sapiens] |
| 263 | IVCPICSQK | E7 | 777 | EECGKAFSVFS | zinc finger |
| | | | | TLTK | protein 273 |
| | | | | | isoform X1 |
| | | | | | [Homo sapiens] |
| 264 | QAEPDRAHY | E7 | 778 | VTGGRGGRQG | Zinc finger |
| | | | | PSPAF | protein 385C |
| | | | | | [Homo sapiens] |
| 265 | QSTHVDIRTLEDLLM | E7 | 779 | CNFSTIDVVSLK | zinc finger |
| | GTLGI | | | TDT | protein 407 |
| | | | | | isoform X2 |
| | | | | | [Homo sapiens] |
| 266 | RAHYNIVTF | E7 | 780 | LTDHRAHRCPG | zinc finger |
| | | | | DGDD | protein 423 |
| | | | | | isoform 2 [Homo |
| | | | | | sapiens] |
| 267 | TLGIVCPI | E7 | 781 | SNLTKHKKIHIE | zinc finger |
| | | | | KKP | protein 43 |
| | | | | | isoform 1 [Homo |
| | | | | | sapiens] |
| 268 | AGQAEPDRAHYNIVT | E7 | 782 | IHKMIHTGEKPY | zinc finger |
| | FCCKCDSTLRLCVQS | | | KCE | protein 493 |
| | THVDI | | | | isoform 3 [Homo |
| | | | | | sapiens] |
| 269 | MHGDTPTLHEYMLDL | E7 | 783 | LQNHIQTIHREL | zinc finger |
| | QPETTDLYCYEQLND | | | VPD | protein 521 |
| | SS | | | | isoform 1 [Homo |
| | | | | | sapiens] |
| 270 | TDLYCYEQLNDSSEE | E7 | 784 | NVAKPSSGPHT | zinc finger |
| | EDEIDGPAGQAEPDR | | | LLHI | protein 626 |
| | AHYNIV | | | | isoform 1, partial |
| | | | | | [Homo sapiens] |
| 271 | LFMDSLNFVCPWC | E7 | 785 | SNLTTHKKIHTG | zinc finger |
| | | | | ERP | protein 626 |
| | | | | | isoform 1, partial |
| | | | | | [Homo sapiens] |
| 272 | EIDGPAGQAEPDRAH | E7 | 786 | EKPYSCPDCSL | zinc finger |
| | YNI | | | RFAY | protein 785 |
| | | | | | [Homo sapiens] |
| 273 | GVNHQHLPARRAEP | E7 | 787 | KCEECDTVFSR | zinc finger |
| | Q | | | KSHH | protein 860 |
| | | | | | [Homo sapiens] |
| 274 | HGDTPTLHEY | E7 | 788 | GCGKVFARSEN | zinc finger |
| | | | | LKIH | protein ZIC 4 |
| | | | | | isoform 3 [Homo |
| | | | | | sapiens] |
| 275 | HYNIVTFCCK | E7 | 789 | RYQQWMERF | zinc |
| | | | | | phosphodiestera |
| | | | | | se ELAC protein |
| | | | | | 2 isoform 3 |
| 276 | LMGTLGIVCPI | E7 | 790 | SAGPPSLRK | ZMYM4 protein |
| 277 | MLDLQPETTDLYCYE | E7 | 791 | PMEKPTISTEKP | zonadhesin |
| | | | | TIP | isoform X1 |
| | | | | | [Homo sapiens] |
| 278 | TLRLCVQSTHVDIRT | E7 | 792 | APIWPYEILY | |
| 279 | LQPETTDLY | E7 | 793 | CYTWNQMNL | |
| 280 | TPTLHEYML | E7 | 794 | DAEKSDICTDE | |
| | | | | Y | |
| 281 | DRAHYNIVTFCCKCD | E7 protein | 795 | ELAGIGILTV | |
| 282 | DSTLRLCVQSTHVD | E7 protein | 796 | IMDQVPFSV | |
| 283 | GTLGIVCPI | E7 protein | 797 | KLCPVQLWV | |
| 284 | HVDIRTLED | E7 protein | 798 | LMLGEFLKL | |
| 285 | LLMGTLGIV | E7 protein | 799 | SLLMWITQA | |
| 286 | MHGDTPTLHEYM | E7 protein | 800 | SLLMWITQV | |
| 287 | TLGIVCPIC | E7 protein | 801 | SLPPPGTRV | |
| 288 | TLHEYMLDL | E7 protein | 802 | TLGIVCPI + | |
| | | | | AIB(C6) | |
| 289 | YMLDLQPET | E7 protein | 803 | VLPDVFIRC | |
| 290 | YMLDLQPETT | E7 protein | 804 | YLEPGPVTL | |
| 291 | DLLMGTLGIVCPICSQ | E7 protein | 805 | YLEPGPVTV | |
| | KP | | | | |
| 292 | HYNIVTFCCKCDSTLR | E7 protein | 806 | YLEPGPVTVP | |
| | LCVQ | | | | |
| 293 | LRLCVQSTHVDIRTLE | E7 protein | 807 | YLGSYGFRL | |
| | DLLM | | | | |
| 294 | CCKCDSTL | E7 protein | 808 | GELIGILNAAKV | |
| | | | | PAD | |
| 295 | STHVDIRTLEDLLMG | E7 protein | 809 | ALGIGILTV | |
| 296 | CDSTLRLCVQSTHVDI | E7 protein | — | 2,4-dinitrophenyl | |
| | RTLE | | | group | |
| 297 | ATEVRTLQQ | E7 protein | 810 | KAVAAWTLKAA | |
| 298 | CTIVCPSCA | E7 protein | 811 | FATGIGIITV | |
| 299 | LCINSTATE | E7 protein | 812 | FLTGIGIITV | |
| 300 | CYEQLGDSS | early protein | — | 6-formylpterin | |
| 301 | ITIRCIICQ | early protein | 813 | ALAGIGILTV | |
| 302 | KTLEERVKK | early protein | 814 | ELAAIGILTV | |
| 303 | MRGDKATIK | early protein | 815 | ELAGIGILAV | |
| 304 | PYGVCIMCL | early protein | — | 5-(2- | |
| | | | | oxopropylidene | |
| | | | | amino)-6-D- | |
| | | | | ribityl | |
| | | | | aminouracil | |
| 305 | QLGDSSDEE | early protein | 816 | GVAGIGILTG + | |
| | | | | MCM(G1, V2, | |
| | | | | G10) | |
| 306 | RLQCVQCKK | early protein | 817 | SAAGIGILTV + | |
| | | | | MCM(S1, A2) | |
| 307 | VYKFLFTDL | early protein | 818 | SVYDFFVWL + | |
| | | | | MCM(S1, V2) | |
| 308 | GGSKTSLYNLRRGTA | EBNA-1 | — | N(2)-acetyl-6- | |
| | | | | formylpterin | |
| 309 | HPVGEADYFEY | EBNA-1 | 819 | ALEPGPVTA | |
| 310 | RPSCIGCKGTHGGTG | EBNA-1 | 820 | YLEAGPVTA | |
| 311 | NPKFENIAEGLRALLA | EBNA-1 protein | 821 | YLEPGAVTA | |
| | RSHVERTTDE | | | | |
| 312 | PGTGPGNGLGEKGD | EBNA-1 protein | 822 | YLEPGPATA | |
| | T | | | | |
| 313 | PPMVEGAAAEGDDG | EBNA-1 protein | 823 | YLEPGPVAA | |
| | D | | | | |
| 314 | VLKDAIKDL | EBNA-1 protein | 824 | AMFWSVPTV | |
| 315 | YFMVFLQTHIFAEVL | EBNA-1 protein | 825 | CLNEYHLFL | |
| 316 | RLRAEAQVK | EBNA3A nuclear protein | 826 | EYYSKNLNSF | |
| 317 | RPPIFIRRL | EBNA3A nuclear protein | 827 | FLYNLLTRV | |
| 318 | RYSIFFDY | EBNA3A nuclear protein | 828 | GLGPGFSSY | |
| 319 | RYSIFFDYM | EBNA3A nuclear protein | 829 | HLYASLSRV | |
| 320 | VQPPQLTQV | EBNA3A nuclear protein | 830 | IILVAVPHV | |
| 321 | VSFIEFVGW | EBNA-3B nuclear protein | 831 | KLMNIQQKL | |
| 322 | RRIYDLIEL | EBNA3C latent protein | 832 | KMIGNHLWV | |
| 323 | VAGCYLKYKKKNSLS | EF-hand calcium-binding | 833 | MLGEQLFPL | |
| | | domain-containing protein | | | |
| | | 13 | | | |
| 324 | DPKDAEKAI | ELAV-like protein 4 | 834 | QLSCISTYV | |
| | | (Paraneoplastic | | | |
| | | encephalomyelitis antigen | | | |
| | | HuD) (Hu-antigen D) | | | |
| 325 | GPFGAVNNV | ELAV-like protein 4 | 835 | TYLPSAWNF | |
| | | (Paraneoplastic | | | |
| | | encephalomyelitis antigen | | | |
| | | HuD) (Hu-antigen D) | | | |
| 326 | KPSGATEPI | ELAV-like protein 4 | 836 | TYLPSAWNFF | |
| | | (Paraneoplastic | | | |
| | | encephalomyelitis antigen | | | |
| | | HuD) (Hu-antigen D) | | | |
| 327 | PPSACSPRF | ELAV-like protein 4 | 837 | VYQYTFPDF | |
| | | (Paraneoplastic | | | |
| | | encephalomyelitis antigen | | | |
| | | HuD) (Hu-antigen D) | | | |
| 328 | SPRFSPITI | ELAV-like protein 4 | 838 | VYQYTFPDFL | |
| | | (Paraneoplastic | | | |
| | | encephalomyelitis antigen | | | |
| | | HuD) (Hu-antigen D) | | | |
| 329 | LADGEGGGTDEGIYD | embryonal Fyn-associated | 839 | YQYTFPDF | |
| | | substrate isoform X2 | | | |
| | | [Homo sapiens] | | | |
| 330 | YVVPPPARPCPTSGP | embryonal Fyn-associated | 840 | YQYTFPDFLY | |
| | | substrate isoform X2 | | | |
| | | [Homo sapiens] | | | |
| 331 | VLACGLSRIWGEERG | endothelin receptor type B | 841 | YSKNLNSFF | |
| | | isoform 2 precursor [Homo | | | |
| | | sapiens] | | | |
| 332 | LDHILEPSIPWKSK | envelope glycoprotein | 842 | YYSKNLNSF | |
| 333 | FTQEVSRLNINLHFSK | envelope glycoprotein | 8432 | YYSKNLNSFF | |
| | CGFPF | | | | |
| 334 | GGYYSASYSDPCSLK | envelope glycoprotein | 844 | AVCPWTWLR | |
| | CPYLGC | | | | |
| 335 | HILEPSIPWKSKLLT | envelope glycoprotein | 845 | APARLERRHSA | |
| 336 | LPFNWTHCFDPQIQAI | envelope glycoprotein | 846 | GEEDGAGGHS | |
| | VSSPC | | | L | |
| 337 | SNLDHILEPSIPWK | envelope glycoprotein | 847 | GLLDEDFYA | |
| 338 | SQLPPTAPPLLPHSNL | envelope glycoprotein | 848 | GQFLTPNSH | |
| | DHILEPSIPWKSKL | | | | |
| 339 | GAGIGVAVL | Envelope glycoprotein C | 849 | HQNPVTGLLL | |
| 340 | IAGIGILAI | envelope glycoprotein C | 850 | RHDLPPYRVYL | |
| 341 | GIGIGSGQL | Epsin-3 | 851 | RKTVRARSRTP | |
| | | | | SCRSRSHTPSR | |
| | | | | RRR | |
| 342 | VFLQTHIFAEVLKDA | Epstein-Barr nuclear | 852 | RVSTLRVSL | |
| | IKDLV | antigen 1 | | | |
| 343 | ELFQDLSQL | ETS translocation variant | 853 | SWISDIRAGTAP | |
| | | 5 | | LCRNHIKSSCSL | |
| | | | | I | |
| 344 | IGGIGTVPV | Eukaryotic translation | 854 | SYMIMEIEL | |
| | | elongation factor 1 alpha 1 | | | |
| 345 | TMLARLVSDS | FAM161 centrosomal | 855 | TLWCSPIKV | |
| | | protein A | | | |
| 346 | GTSSVIVSR | F-box/WD repeat- | 856 | VLLGVKLFGV | |
| | | containing protein 11 | | | |
| | | isoform A | | | |
| 347 | RINEFSISSF | fibromodulin | 857 | WLIRETQPITK | |
| 348 | DEVSMKGRPPPTPLF | FK506-binding protein 15 | 858 | YHSIEWAI | |
| | | isoform X3 [Homo | | | |
| | | sapiens] | | | |
| 349 | YLCSGSSYF | Fragile X mental | 859 | EAKPSRILM | |
| | | retardation 1 neighbor | | | |
| | | protein | | | |
| 350 | YLCSGSSYFV | Fragile X mental | 860 | GIAARVKNWL | |
| | | retardation 1 neighbor | | | |
| | | protein | | | |
| 351 | ALGIGAVPI | Full-length cDNA clone | 861 | KEGIAARVKNW | |
| | | CSODI011YN22 of | | | |
| | | Placenta of Homo sapiens | | | |
| | | (human) | | | |
| 352 | SQNPRFYHK | G protein pathway | 862 | WEAKPSRIL | |
| | METH(R5) | suppressor 2 | | | |
| 353 | ALFDIESKV | Glutamate | 863 | AARGPHGGAA | |
| | | carboxypeptidase 2 | | SGL | |
| 354 | MQLIPDDYSNTHSTR | glycoprotein B | 864 | APAGPHGGAAS | |
| | YVTVK | | | GL | |
| 355 | EYILSLEEL | glypican 3 | 865 | APRGAHGGAA | |
| | | | | SGL | |
| 356 | FVGEFFTDV | glypican 3 | 866 | APRGPAGGAAS | |
| | | | | GL | |
| 357 | AVYGQKEIHRK | GTPase activating protein | 867 | APRGPHAGAAS | |
| | | (SH3 domain) binding | | GL | |
| | | protein 1 | | | |
| 358 | KLVVVGAGGVGKSAL | GTPase KRas isoform a | 868 | APRGPHGGAA | |
| | | [Homo sapiens] | | AGL | |
| 359 | VYLDKFIRL | guanine nucleotide- | 869 | APRGPHGGAA | |
| | | binding protein-like 3-like | | SAL | |
| | | protein | | | |
| 360 | FKQDLMIEDNLL | hCG16256, isoform | 870 | APRGPHGGAA | |
| | | CRA_a [Homo sapiens] | | SGA | |
| 361 | ALKIKGIHPYHSLSY | hCG1810774, isoform | 871 | GRIAFFLKY | |
| | | CRA_c [Homo sapiens] | | | |
| 362 | TPEPAIPPKATLWPA | hCG2000808, partial | 872 | KLILWRGLK | |
| | | [Homo sapiens] | | | |
| 363 | LLDVAPLSL | Heat shock 70 kDa protein | 873 | ILEDRGFNQV | |
| | | 1 | | | |
| 364 | LLLLDVAPL | Heat shock 70 kDa protein | 874 | IMEDVGWLNV | |
| | | 1 | | | |
| 365 | TYLPTNASL | HER2 receptor | 875 | LMFDRGMSLL | |
| 366 | VLHDDLLEA | histocompatibility (minor) | 876 | MMWDAGLGM | |
| | | HA-1 | | M | |
| 367 | LEKQLIEL | HMMR protein | 877 | MMWDRGAGM | |
| | | | | M | |
| 368 | SVSPVVHVR | HNRPLL protein | 878 | MMWDRGLGAM | |
| 369 | DKKIEPRGPTIKPCPP | immunoglobulin gamma | 879 | MMWDRGLGM | |
| | CKCP | 2A chain | | | |
| 370 | RGPTIKPCPPCKCP | immunoglobulin gamma | 880 | MMWDRGLGM | |
| | | 2A chain | | M | |
| 371 | LGIGVITI | Immunoglobulin heavy | 881 | MMWDRGMGLL | |
| | | chain | | | |
| 372 | GYGEMGSGYREDLG | immunoglobulin-like and | 882 | NLSNLGILV | |
| | A | fibronectin type Ill domain- | | | |
| | | containing protein 1 | | | |
| | | isoform X3 [Homo | | | |
| | | sapiens] | | | |
| 373 | ETDPLTFNF | inactive phospholipase D5 | 883 | NMGGLGIMPV | |
| | | [Homo sapiens] | | | |
| 374 | LQPYYGFSNQEVIEM | Inactive tyrosine-protein | 884 | SMAGIGIVDV | |
| | VRKRQ | kinase transmembrane | | | |
| | | receptor ROR1 | | | |
| 375 | NKSQKPYKI | Inactive tyrosine-protein | 885 | SMLGIGIVPV | |
| | | kinase transmembrane | | | |
| | | receptor ROR1 | | | |
| 376 | SLSASPVSN | Inactive tyrosine-protein | 886 | CMWGRLWQL | |
| | | kinase transmembrane | | | |
| | | receptor ROR1 | | | |
| 377 | TMIGTSSHL | Inactive tyrosine-protein | 887 | NLSNLGILPV | |
| | | kinase transmembrane | | | |
| | | receptor ROR1 | | | |
| 378 | VATNGKEVV | Inactive tyrosine-protein | 888 | SLANIGILPV | |
| | | kinase transmembrane | | | |
| | | receptor ROR1 | | | |
| 379 | NLSALGIFST | Insulin-like growth factor 2 | 889 | ITSAIGILPV | |
| | | mRNA-binding protein 2 | | | |
| 380 | EFESAQFPNWYISTS | Interleukin-1 beta | 890 | ITSAIGVLFV | |
| 381 | YKAFSSLLASSAVS | interleukin-4 receptor alfa | 891 | ITSAIGVLPI | |
| | PE | chain | | | |
| 382 | LIGIGIAPL | iron-responsive element- | 892 | ITSAIGVLPV | |
| | | binding protein 2 | | | |
| 383 | LVLILYLCV | K8.1 | 893 | ITSGIGVLPV | |
| 384 | LLDRGSFRNDGLKAS | kalirin isoform 2 [Homo | 894 | LTSAIGVLPV | |
| | | sapiens] | | | |
| 385 | ARVILGVRWYVETTS | kallikrein 6 (neurosin, | 895 | MTSAIGILPV | |
| | | zyme), isoform CRA_c, | | | |
| | | partial [Homo sapiens] | | | |
| 386 | CQGDSGGPLVCGDH | kallikrein-related | 896 | MTSAIGVLPV | |
| | L | peptidase 6 transcript | | | |
| | | variant 10 [Homo sapiens] | | | |
| 387 | KPVILGVRWYVETTS | kallikrein-related | 897 | QTSAIGILPV | |
| | | peptidase 6 transcript | | | |
| | | variant 6 [Homo sapiens] | | | |
| 388 | SQLMLTRKAEAALRK | KAT8 regulatory NSL | 898 | QTSAIGVLPV | |
| | | complex subunit 1 isoform | | | |
| | | X6 [Homo sapiens] | | | |
| 389 | VPVAQVTTTSTTDAD | keratin associated protein | 899 | FILLLFLTIFI | |
| | | [Homo sapiens] | | | |
| 390 | CRPQCCQSVCCQPT | keratin associated protein | 900 | FISIFFFLEI | |
| | C | 4.14 [Homo sapiens] | | | |
| 391 | PRCCISSCCRPSCCV | keratin associated protein | 901 | FMDMAILVES | |
| | | 4.14 [Homo sapiens] | | | |
| 392 | SSGGGSSGGGYGGG | Keratin, type I cytoskeletal | 902 | ILLLFLTIFI | |
| | S | 10 | | | |
| 393 | TCCRTTCYRPSCCVS | Keratin-associated protein | 903 | LLFLTIFIYA | |
| | | 4-7 | | | |
| 394 | AFTLLLYCELLQWED | KIAA0299, partial [Homo | 904 | LLLFLTIFI | |
| | | sapiens] | | | |
| 395 | ENKNQELRSLISQYQ | KIAA0299, partial [Homo | 905 | RLMVAVEEA | |
| | | sapiens] | | | |
| 396 | NVSFFHYPEYGY | KIAA1455 protein, partial | 906 | RLMVAVEEAFI | |
| | | [Homo sapiens] | | | |
| 397 | RKFISLHRKALESDF | KIAA1607 protein, partial | 907 | DLAGIGILTV | |
| | | [Homo sapiens] | | | |
| 398 | LQIEEEYQV | L protein | 908 | EIAGIGILTV | |
| 399 | IHSMNSSIL | L1 | 909 | ELAGIGIITV | |
| 400 | NVFPIFLQM | L1 | 910 | ELAGIGILSV | |
| 401 | AVPDDLYIK | L1 | 911 | ELAGIGILTA | |
| 402 | KYTFWEVNL | L1 | 912 | ELAGIGILTI | |
| 403 | IHSMNSTIL | L1 protein | 913 | ELAGIGLLTV | |
| 404 | NLASSNYFPTPSGSM | L1 protein | 914 | ELGGIGILTV | |
| 405 | PSGSMVTSDAQIFNK | L1 protein | 915 | AYRDLQTRK | |
| 406 | GNIPLMKAAFKRSCL | large T antigen [Merkel | 916 | EGTKGATMDLE | |
| | KHHPD | cell polyomavirus] | | IVNLPNVEISKD | |
| | | | | LS | |
| 407 | MDLVLNRKEREAL | large T antigen [Merkel | 917 | EWDPLDIAFET | |
| | | cell polyomavirus] | | WDIIFRNMNKE | |
| | | | | DEG | |
| 408 | NSGRESSTPNGTSVP | large T antigen [Merkel | 918 | GKAFGLCSIFTE | |
| | RNSSR | cell polyomavirus] | | QKKIFSREKCY | |
| | | | | KC | |
| 409 | PVIMMELNTLWSK | large T antigen [Merkel | 919 | HYNYMCNSSC | |
| | | cell polyomavirus] | | MGSMNRRPILTI | |
| | | | | ITL | |
| 410 | TLWSKFQQNIHKL | large T antigen [Merkel | 920 | ILQYLDSERRQI | |
| | | cell polyomavirus] | | RIAKSPLAPFTS | |
| | | | | F | |
| 411 | WEDLFCDESLSSP | large T antigen [Merkel | 921 | KQHVCGGSILD | |
| | | cell polyomavirus] | | PYWVLTAAHCF | |
| | | | | RKH | |
| 412 | WEDLFCDESLSSPEP | large T antigen [Merkel | 922 | LGSRELFCSKL | |
| | PSSSE | cell polyomavirus] | | RRAAVFPPAHQ | |
| | | | | QRT | |
| 413 | TSESQLFNK | late protein | 923 | MTEYKLVVVGA | |
| | | | | VGVGKSALTIQL | |
| | | | | - | |
| 414 | YYYAGSSRL | late protein | 924 | NTVFGAERKKR | |
| | | | | LFIIGPTSRDRS | |
| | | | | SP | |
| 415 | LQFIFQLCK | late protein | 925 | PAIRVPPVIPLG | |
| | | | | SRELFCSKLRR | |
| | | | | AA | |
| 416 | MTLCAEVKK | late protein | 926 | PGISSQHFTYQ | |
| | | | | GGVGGSWPVC | |
| | | | | SGLG | |
| 417 | QYRVFRIKL | late protein | 927 | PTPSAPCPATP | |
| | | | | AVPKGRVFVSP | |
| | | | | LAK | |
| 418 | YLLEMLWRL | Latent membrane protein | 928 | SFVNDIFERIAG | |
| | | 1 | | VASRLAHYNKR | |
| | | | | ST | |
| 419 | YLQQNWWTL | latent membrane protein 1 | 929 | SLAALKKALAD | |
| | | | | GGYDVEKNNS | |
| | | | | RI | |
| 420 | ALLVLYSFA | latent membrane | 930 | VISAEKAYHEQL | |
| | | protein 1 | | TVAEITNACFEP | |
| | | | | A | |
| 421 | CLGGLLTMV | Latent membrane | 931 | VRLAQGLTHLG | |
| | | protein | | KATLTLCPYHS | |
| | | 2 | | DRQ | |
| 422 | GLGTLGAAL | latent membrane | 932 | FISNTVFRK | |
| | | protein 2 | | | |
| 423 | LLSAWILTA | Latent membrane | 933 | FLFELIPEP | |
| | | protein | | | |
| | | 2 | | | |
| 424 | LLWTLVVLL | latent membrane | 934 | FLGEAWAQV | |
| | | protein 2 | | | |
| 425 | PYLFWLAAI | Latent membrane | 935 | FVGALSFSI | |
| | | protein | | | |
| | | 2 | | | |
| 426 | MGSLEMVPM | Latent membrane | 936 | ILGIFNEFV | |
| | | protein | | | |
| | | 2 | | | |
| 427 | SLGGLLTMA | Latent membrane | 937 | ILSPSAHEL | |
| | | protein | | | |
| | | 2 | | | |
| 428 | TYGPVFMSL | latent membrane | 938 | IMSSSLFNL | |
| | | protein | | | |
| | | 2A | | | |
| 429 | SSCSSCPLSKV | latent membrane | 939 | KIYRRQIFK | |
| | | protein | | | |
| | | 2A | | | |
| 430 | QKEKSLEFTKELPGY | leucine-rich repeat- | 940 | KLADYLNVL | |
| | | containing | | | |
| | | protein 37A3 | | | |
| | | isoform 1 precursor | | | |
| | | [Homo | | | |
| | | sapiens] | | | |
| 431 | PGESLRPRGERRLPQ | leukocyte | 941 | KVFEHVGSR | |
| | | immunoglobulin | | | |
| | | like receptor A6 | | | |
| 432 | PGSGPQNRLGRYLEV | leukocyte | 942 | LLHGFSFYL | |
| | | immunoglobulin- | | | |
| | | like receptor | | | |
| | | subfamily B | | | |
| | | member 3 isoform X2 | | | |
| | | [Homo sapiens] | | | |
| 433 | SSFGRGFFK | liprin-beta1 | 943 | LLVDLAEEL | |
| 434 | AFFLDLILLIIALYL | LMP1 protein | 944 | LPRAKKLIL | |
| | QQNWW | (Epstein- | | | |
| | | Barr virus, | | | |
| | | putative | | | |
| | | LYDMA gene) | | | |
| 435 | ALLVLYSFALMLII | LMP1 protein | 945 | NLRYFAKSL | |
| | IILIIF | (Epstein- | | | |
| | | Barr virus, | | | |
| | | putative | | | |
| | | LYDMA gene) | | | |
| 436 | CLLVLGIWIYLLEMLW | LMP1 protein | 946 | QMIYSAARV | |
| | RLGA | (Epstein- | | | |
| | | Barr virus, | | | |
| | | putative | | | |
| | | LYDMA gene) | | | |
| 437 | DWTGGALLVLYSFAL | LMP1 protein | 947 | RLFGEAPREL | |
| | MLIII | (Epstein- | | | |
| | | Barr virus, | | | |
| | | putative | | | |
| | | LYDMA gene) | | | |
| 438 | GALCILLLMITLLLIAL | LMP1 protein | 948 | RLSDFSEQL | |
| | WNL | (Epstein- | | | |
| | | Barr virus, | | | |
| | | putative | | | |
| | | LYDMA gene) | | | |
| 439 | GIWIYLLEMLWRLGAT | LMP1 protein | 949 | RMWDFDIFL | |
| | IWQL | (Epstein- | | | |
| | | Barr virus, | | | |
| | | putative | | | |
| | | LYDMA gene) | | | |
| 440 | GPRRPPRGPPLSSSL | LMP1 protein | 950 | SLLRSLENV | |
| | GLALL | (Epstein- | | | |
| | | Barr virus, | | | |
| | | putative | | | |
| | | LYDMA gene) | | | |
| 441 | ILIIFIFRRDLLCPL | LMP1 protein | 951 | SLRSHHYSL | |
| | GALCI | (Epstein- | | | |
| | | Barr virus, | | | |
| | | putative | | | |
| | | LYDMA gene) | | | |
| 442 | LFLAILIWMYYHGQRH | LMP1 protein | 952 | VLDGFIPGT | |
| | SDEH | (Epstein- | | | |
| | | Barr virus, | | | |
| | | putative | | | |
| | | LYDMA gene) | | | |
| 443 | LILLIIALYLQQNWW | LMP1 protein | 953 | VLQEATICV | |
| | TLLVD | (Epstein- | | | |
| | | Barr virus, | | | |
| | | putative | | | |
| | | LYDMA gene) | | | |
| 444 | LLFWLYIVMSDWTGG | LMP1 protein | 954 | WVLALFDEV | |
| | ALLVL | (Epstein- | | | |
| | | Barr virus, | | | |
| | | putative | | | |
| | | LYDMA gene) | | | |
| 445 | LLLMITLLLIALWNL | LMP1 protein | 955 | YILKYSVFL | |
| | HGQAL | (Epstein- | | | |
| | | Barr virus, | | | |
| | | putative | | | |
| | | LYDMA gene) | | | |
| 446 | LLWLLLFLAILIWMYY | LMP1 protein | 956 | DANSFLQSV | |
| | HGQR | (Epstein- | | | |
| | | Barr virus, | | | |
| | | putative | | | |
| | | LYDMA gene) | | | |
| 447 | LSSSLGLALLLLLL | LMP1 protein | 957 | TEYKLVVVGAV | |
| | ALLFWL | (Epstein- | | GVGKSALTIQ | |
| | | Barr virus, | | | |
| | | putative | | | |
| | | LYDMA gene) | | | |
| 448 | NDGGPPQLTEEVENK | LMP1 protein | 958 | AGAFLSSPGLL | |
| | GGDQG | (Epstein- | | AVFG | |
| | | Barr virus, | | | |
| | | putative | | | |
| | | LYDMA gene) | | | |
| 449 | PRGPPLSSSLGLALLL | LMP1 protein | 959 | ARGGLVDEKAL | |
| | LLLA | (Epstein- | | ARALKEGRIRG | |
| | | Barr virus, | | AAL | |
| | | putative | | | |
| | | LYDMA gene) | | | |
| 450 | QQNWWTLLVDLLWL | LMP1 protein | 960 | FEDKSVAYT | |
| | LLFLAI | (Epstein- | | | |
| | | Barr virus, | | | |
| | | putative | | | |
| | | LYDMA gene) | | | |
| 451 | YHGQRHSDEHHHDD | LMP1 protein | 961 | FYNDIILMV | |
| | SLPHPQ | (Epstein- | | | |
| | | Barr virus, | | | |
| | | putative | | | |
| | | LYDMA gene) | | | |
| 452 | YIVMSDWTGGALLVL | LMP1 protein | 962 | GFPAERLEGVY | |
| | YSFAL | (Epstein- | | SNNI | |
| | | Barr virus, | | | |
| | | putative | | | |
| | | LYDMA gene) | | | |
| 453 | YSFALMLIIIILI | LMP1 protein | 963 | GLNFVSVKGPE | |
| | IFIFRRD | (Epstein- | | LLNM | |
| | | Barr virus, | | | |
| | | putative | | | |
| | | LYDMA gene) | | | |
| 454 | PSHOPPASTLSPNPT | LOC285679 protein | 964 | KALARALKEGRI | |
| | | [Homo sapiens] | | R | |
| 455 | RYCNLEGPPI | LY6K protein, | 965 | LILFFHTLGLQT | |
| | | partial | | KEE | |
| | | [Homo sapiens] | | | |
| 456 | YMASWVMLGITYRNK | lymphocyte | 966 | NNTDIRLIGEKL | |
| | SLMW | antigen 75 | | FHG | |
| | | precursor | | | |
| 457 | SPRPPLGSSL | lysine-specific | 967 | RYYVGHKAKF | |
| | | demethylase | | | |
| | | 2B isoform a | | | |
| 458 | DEMDCPLSPTPPLCS | MAM and LDL- | 968 | YEGQVISNGF | |
| | | receptor | | | |
| | | class A domain- | | | |
| | | containing | | | |
| | | protein 1 | | | |
| | | isoform X7 | | | |
| | | [Homo sapiens] | | | |
| 459 | FLNQTDETL | Mammaglobin-A | 969 | CLWGRLWQL | |
| | | precursor | | | |
| 460 | KLLMVLMLA | Mammaglobin-A | 970 | ALPLSEPMRRS | |
| | | precursor | | VSEE | |
| 461 | LIYDSSLCDL | Mammaglobin-A | 971 | EMSALLARRRR | |
| | | precursor | | IVEK | |
| 462 | LMVLMLAAL | Mammaglobin-A | 972 | FLQEVNVCGV | |
| | | precursor | | | |
| 463 | TINPQVSKT | Mammaglobin-A | 973 | KLVVVGADGV | |
| | | precursor | | | |
| 464 | LWHLQGPKDLMLKLR | matriptase-2 | 974 | LKLMAYLAGAK | |
| | | [Homo | | YTGC | |
| | | sapiens] | | | |
| 465 | YLEKESIYY | Matrix protein | 975 | LLKAELVAGL | |
| 466 | GILGFVFTL | Matrix protein 1 | 976 | PKPVLHMVSSE | |
| | | | | QHSG | |
| 467 | RLEDVFAGK | Matrix protein 1 | 977 | QWINYFDKRRD | |
| | | | | YLKF | |
| 468 | VMMHGGPPHPGMP | Meis1, myeloid | 978 | RTDLVKSELLHI | |
| | MS | ecotropic | | ECQ | |
| | | viral integration | | | |
| | | site 1 | | | |
| | | homolog (mouse), | | | |
| | | isoform | | | |
| | | CRA_e [Homo sapiens] | | | |
| 469 | ALLAVGATK | Melanocyte protein Pmel | 979 | SEIVPCLSERHK | |
| | | 17 precursor | | AYL | |
| 470 | ITDQVPFSV | Melanocyte protein Pmel | 980 | SFYNNLVSFAS | |
| | | 17 precursor | | PLVT | |
| 471 | WNRQLYPEWTEAQR | Melanocyte protein Pmel | 981 | VAGCYLKYKNK | |
| | LD | 17 precursor | | NSLS | |
| 472 | YLEPGPVTA | Melanocyte protein Pmel | 982 | AFMYAKKGEW | |
| | | 17 precursor | | KKAEE | |
| 473 | NRQLYPEWTEAQRL | Melanocyte protein Pmel | 983 | AFTMLLYCELL | |
| | D | 17 precursor | | QWED | |
| 474 | NRQLYPEWTEAQR | Melanocyte protein Pmel | 984 | AGQNPASDPPP | |
| | | 17 precursor | | DDAE | |
| 475 | RTKAWNRQLYPEWT | Melanocyte protein Pmel | 985 | AGRFGQGDHH | |
| | EAQR | 17 precursor | | AAGQA | |
| 476 | WNRQLYPEWTEAQR | Melanocyte protein Pmel | 986 | ALKIKGIRPYHS | |
| | | 17 precursor | | LSY | |
| 477 | RYGSFSVTL | Melanocyte protein Pmel | 987 | ARVILGVCWYV | |
| | | 17 precursor | | ETTS | |
| 478 | ASSIMSTESITGSLGP | Melanocyte protein Pmel | 988 | AVKRLPLIYCDY | |
| | LLDG | 17 precursor | | HGH | |
| 479 | ESITGSLGPLL | Melanocyte protein Pmel | 989 | AVVFQDSMVFR | |
| | | 17 precursor | | VAPW | |
| 480 | HRRGSRSYV | Melanocyte protein Pmel | 990 | AVYTPPSDSTH | |
| | | 17 precursor | | QMPR | |
| 481 | STESITGSLGPLLDGT | Melanocyte protein Pmel | 991 | CNECGKALCQS | |
| | ATLR | 17 precursor | | PSLI | |
| 482 | THTMEVTVYHRRGSR | Melanocyte protein Pmel | 992 | CNFSTIDVSLKT | |
| | SYVPL | 17 precursor | | DTE | |
| 483 | VLYRYGSFSVTLDIVQ | Melanocyte protein Pmel | 993 | CRGSGKSKVGT | |
| | GIES | 17 precursor | | SGDH | |
| 484 | VPLDCVLYRYGSFSV | Melanocyte protein Pmel | 994 | CVSMLGVLVDP | |
| | TLDIV | 17 precursor | | DTLH | |
| 485 | VTVYHRRGSRSYVPL | Melanocyte protein Pmel | 995 | DEMDCPLRPTP | |
| | AHSSS | 17 precursor | | PLCS | |
| 486 | AMLGTHTMEV | melanoma antigen gp100 | 996 | DFGFALTLAAP | |
| | | | | GDI | |
| 487 | ALYVDSLFFL | melanoma antigen | 997 | DPSAIGLVDPPI | |
| | | preferentially expressed in | | PSP | |
| | | tumors | | | |
| 488 | SQLTTLSFY | melanoma antigen | 998 | ECGKAFNSSSN | |
| | | preferentially expressed in | | LTKH | |
| | | tumors | | | |
| 489 | AAGIGILTV | Melanoma antigen | 999 | ECGQAFSISSN | |
| | | recognized by T cells 1 | | LMRH | |
| 490 | EAAGIGILTV | Melanoma antigen | 1000 | EECGKAFRVFS | |
| | | recognized by T cells 1 | | TLTK | |
| 491 | ILTVILGVL | Melanoma antigen | 1001 | EECGKPFKRFS | |
| | | recognized by T cells 1 | | YLTV | |
| 492 | RNGYRALMDKSLHV | Melanoma antigen | 1002 | EFPVLQAAAIYL | |
| | GTQCALTRR | recognized by T cells 1 | | K | |
| 493 | APPAYEKLSAEQ + | Melanoma antigen | 1003 | EHSQETEILREA | |
| | PHOS(S9) | recognized by T cells 1 | | LLS | |
| 494 | APPAYEKLSAEQSPP | Melanoma antigen | 1004 | EKKQQFRSLKE | |
| | + PHOS(S9) | recognized by T cells 1 | | KCFL | |
| 495 | APPAYEKLSAEQSPP | Melanoma antigen | 1005 | EKPYSCPECSL | |
| | P + PHOS(S9) | recognized by T cells 1 | | RFAY | |
| 496 | APPAYEKLSAEQSPP | Melanoma antigen | 1006 | EPGDTALHLCA | |
| | PY + PHOS(S9) | recognized by T cells 1 | | SSQS | |
| 497 | NAPPAYEKLSAE | Melanoma antigen | 1007 | FASPGDDRDG | |
| | PHOS(S10) | recognized by T cells 1 | | RAEGF | |
| 498 | VPNAPPAYEKLSAEQ | Melanoma antigen | 1008 | FEGTEMWYPN | |
| | SPPPY + PHOS | recognized by T cells 1 | | RELSE | |
| | (S12) | | | | |
| 499 | EEAAGIGIL | Melanoma antigen | 1009 | FSISQLQTNHD | |
| | | recognized by T cells 1 | | MNDE | |
| 500 | GHGHSYTTAEEAAGI | Melanoma antigen | 1010 | GAIVIELPNVKW | |
| | GILTV | recognized by T cells 1 | | S | |
| 501 | YTTAEEAAGIGILT | Melanoma antigen | 1011 | GCLGGENCFRL | |
| | VILGVL | recognized by T cells 1 | | RLES | |
| 502 | EADPTGHSY | Melanoma-associated | 1012 | GEPIPQPVRLR | |
| | | antigen 1 | | YVTS | |
| 503 | RVRFFFPSL | Melanoma-associated | 1013 | GLLRYWRTERL | |
| | | antigen 1 | | F | |
| 504 | EVDPIGHLY | Melanoma-associated | 1014 | GLPTDTICKEFR | |
| | | antigen 3 | | TRM | |
| 505 | FLWGPRALV | Melanoma-associated | 1015 | GRKFAAWGPP | |
| | | antigen 3 | | SFSQT | |
| 506 | MEVDPIGHLY | Melanoma-associated | 1016 | GRLILWEGPPL | |
| | | antigen 3 | | GAGG | |
| 507 | EVDPIGHVY | melanoma-associated | 1017 | GRNSFEVLVCA | |
| | | antigen 6 | | CPGR | |
| 508 | LLFGLALIEV | Melanoma-associated | 1018 | GYGEMGSVYR | |
| | | antigen C2 | | EDLGA | |
| 509 | CPLSKILL | membrane protein | 1019 | HGLSHSLWQIS | |
| | | | | SQLS | |
| 510 | FLYALALL | membrane protein | 1020 | HKRIHNGDKPY | |
| | | | | KCEE | |
| 511 | FLYALALLL | membrane protein | 1021 | HNNIVYNKYISH | |
| | | | | REH | |
| 512 | GGSILQTNFKSLSS | membrane protein | 1022 | HQRTHTGDKPF | |
| | TEF | | | KCDE | |
| 513 | IEDPPFNSL | membrane protein | 1023 | IHKMIHTVEKPY | |
| | | | | KCE | |
| 514 | LLWTLVVL | membrane protein | 1024 | IHSSWDCSLFT | |
| | | | | NYSA | |
| 515 | LTAGFLIFL | membrane protein | 1025 | ILFSLQPGLLRY | |
| | | | | W | |
| 516 | PYLFWLAA | membrane protein | 1026 | ILLIHCDTHLHTP | |
| | | | | MY | |
| 517 | RRRWRRLTV | membrane protein | 1027 | IMASKGMHHFC | |
| | | | | LISE | |
| 518 | SSCSSCPLSK | membrane protein | 1028 | KAFSQSSSLRK | |
| | | | | HEII | |
| 519 | SSCSSCPLSKI | membrane protein | 1029 | KCDECGNDFN | |
| | | | | WPATL | |
| 520 | TYGPVFMCL | membrane protein | 1030 | KCEECDTDFSR | |
| | | | | KSHH | |
| 521 | VMSNTLLSAW | membrane protein | 1031 | KELRALREMVS | |
| | | | | NMSG | |
| 522 | VTLAHAGYY | membrane protein BILF2 | 1032 | KLKKKQVKVFA | |
| | | [Human | | | |
| | | gammaherpesvirus 4] | | | |
| 523 | PFSPSHPAPPSDPSH | membrane-associated | 1033 | KLSVAPSVVLE | |
| | | guanylate kinase, WW | | EDQV | |
| | | and PDZ domain- | | | |
| | | containing protein 2 | | | |
| | | isoform X11 [Homo | | | |
| | | sapiens] | | | |
| 524 | ALGIGVYPV | Membrane-associated | 1034 | KLVVVGAVGVG | |
| | | phosphatidylinositol | | KSAL | |
| | | transfer protein 1 | | | |
| 525 | VNTTTSPVNTTTSPV | membrane-spanning 4- | 1035 | KPVILGVCWYV | |
| | | domains subfamily A | | ETTS | |
| | | member 18 [Homo | | | |
| | | sapiens] | | | |
| 526 | RTDLVKSELLHIESQ | Methionine synthase | 1036 | KSEGEEAHEVE | |
| | | reductase | | GETQ | |
| 527 | ALGLGLLPV | MFS transporter | 1037 | LADGEGGATDE | |
| | | [bacterium JGI 053] | | GIYD | |
| 528 | DILEQARAAVDTYCR | MHC class II antigen, | 1038 | LELINKLLSPVV | |
| | | partial [Homo sapiens] | | PQ | |
| 529 | HSLRYFRLGVSDPIR | MHC class I-like antigen | 1039 | LFGLGKDVGW | |
| | GVPE | MR-1 | | GPPAR | |
| 530 | KDQGPIVPAPVKGEG | microtubule-associated | 1040 | LGLWRGEAVTL | |
| | | protein 6 isoform X4 | | SNPK | |
| | | [Homo sapiens] | | | |
| 531 | VKDQGPMVSAPVKD | microtubule-associated | 1041 | LLDRGSFWND | |
| | Q | protein 6 isoform X4 | | GLKAS | |
| | | [Homo sapiens] | | | |
| 532 | RASHPIVQK | midasin | 1042 | LLIHCDAYLHTP | |
| | | | | MYF | |
| 533 | LLSAVLPSV | Mini-chromosome | 1043 | LNKVTIDAIHRL | |
| | | maintenance complex- | | PL | |
| | | binding protein | | | |
| 534 | AQGWSTVARFQITAT | mitochondrial ATP-Mg/Pi | 1044 | LQNHIQTFHREL | |
| | | carrier protein, partial | | VPD | |
| | | [Homo sapiens] | | | |
| 535 | NTVFGAERKKRLSIIG | Mitogen-activated protein | 1045 | LRPQLAEKKQQ | |
| | PTSRDRSSP | kinase kinase kinase 2 | | FRNL | |
| 536 | MSYDYHQNWGRDG | MLEL1 protein [Homo | 1046 | LTDHRAHCCPG | |
| | G | sapiens] | | GNAK | |
| 537 | LNKVTIDARHRLPL | MORC family CW-type | 1047 | LWHLQGPEDL | |
| | | zinc finger protein 1 | | MLKLR | |
| | | [Homo sapiens] | | | |
| 538 | HGNSSIIADQIALKLV | MTHFD1 protein | 1048 | LWTEGMLKMAF | |
| | GPE | | | HILA | |
| 539 | TTTASTEGSETTTAS | MUC22, partial [Homo | 1049 | MNAAVTFTNCA | |
| | | sapiens] | | LGRV | |
| 540 | STAPPVHNV | Mucin-1 | 1050 | MSYDYHHNWG | |
| | | | | RDGG | |
| 541 | LLLLTVLTV | Mucin-1 precursor | 1051 | NLVHGPPGPPQ | |
| | | | | VGAD | |
| 542 | FASPGDDGDGRAEG | Mucin-12 | 1052 | NVSFFHYQEYG | |
| | F | | | Y | |
| 543 | LAGIGLIAA | MULTISPECIES: gamma- | 1053 | PFSPSHPGPPS | |
| | | glutamyltransferase | | DPSH | |
| | | [Pseudomonas] | | | |
| 544 | LGGLGLFFA | Mycocerosic acid | 1054 | PMEKPTITTEKP | |
| | | synthase | | TIP | |
| 545 | VLQELNVTV | Myeloblastin precursor | 1055 | PRCCISSFCRP | |
| | | | | SCCV | |
| 546 | EHSQETESLREALLS | myomegalin isoform X22 | 1056 | PSRHRYGTRQP | |
| | | [Homo sapiens] | | RARL | |
| 547 | YIGEVLVSV | myosin IG | 1057 | PTKCEVEQFTA | |
| | | | | TSFG | |
| 548 | FLIIILDHL | Myotubularin | 1058 | PVCSGASSSCC | |
| | | | | QQSS | |
| 549 | KLSVAPSEVLEEDQV | N-acetyllactosaminide | 1059 | PWRKFPVHVLG | |
| | | alpha-1,3- | | QFLG | |
| | | galactosyltransferase | | | |
| 550 | NQLKERSFAQLISKD | NACHT, LRR and PYD | 1060 | QDLMLEDNLLK | |
| | | domains-containing | | LEV | |
| | | protein 14 [Homo sapiens] | | | |
| 551 | YVSMMCNEQAYSLA | NADH dehydrogenase | 1061 | QEVEGETHKTE | |
| | V | [ubiquinone]iron-sulfur | | GDAQ | |
| | | protein 2, mitochondrial | | | |
| | | isoform 1 precursor [Homo | | | |
| | | sapiens] | | | |
| 552 | FLKGIGWIPI | Nebulin | 1062 | QLLEGLGCTLT | |
| | | | | VVPE | |
| 553 | LRPQLAENKQQFRNL | neuroblastoma breakpoint | 1063 | QLTAHKMNHTG | |
| | | family member 11 isoform | | EKPY | |
| | | b [Homo sapiens] | | | |
| 554 | EKKQQFRNLKEKCFL | neuroblastoma breakpoint | 1064 | RKFISLHKKALE | |
| | | family member 26 [Homo | | SDF | |
| | | sapiens] | | | |
| 555 | KALRLSASALF | neurosecretory protein | 1065 | SGSGSGPFPSL | |
| | | VGF precursor | | FLNS | |
| 556 | AFMYAKKEEWKKAEE | Neutrophil cytosolic factor | 1066 | SHNSSLIFHQR | |
| | | 2 [Homo sapiens] | | VHTG | |
| 557 | TMLDIQPED | Non-structural protein 2a | 1067 | SKMGKWCSHC | |
| | | | | FAWCR | |
| 558 | GVFVYGGSKTSLYNL | nuclear antigen EBNA-1 | 1068 | SKMGKWCSHC | |
| | | | | FPCCR | |
| 559 | FLRGRAYGL | nuclear antigen EBNA-3 | 1069 | SNDSSLTHHQR | |
| | | | | VHTG | |
| 560 | KLKKKQVNVFA | nuclear receptor co- | 1070 | SNLTKHKIIHIEK | |
| | | repressor 1, isoform | | KP | |
| | | CRA_c [Homo sapiens] | | | |
| 561 | ILRGSVAHK | Nucleoprotein | 1071 | SNLTTHKIIHTG | |
| | | | | ERP | |
| 562 | VYGIRLEHF | NUF2R | 1072 | SSGGGSSSGG | |
| | | | | YGGGS | |
| 563 | SLLMWITQCFLPVF | NY-ESO-1 protein | 1073 | SSLPGPPGPPG | |
| | | | | PRGY | |
| 564 | YLAMPFATPMEAELA | NY-ESO-1 protein | 1074 | STAYPAPVRRR | |
| | RRSLA | | | CCLP | |
| 565 | LAMPFATPM | NY-ESO-1 protein | 1075 | STLLTEHLRIHT | |
| | | | | GEK | |
| 566 | MPFATPMEA | NY-ESO-1 protein | 1076 | STLNTHKSIHTG | |
| | | | | EEP | |
| 567 | MPFATPMEAEL | NY-ESO-1 protein | 1077 | TCCRTTCFRPS | |
| | | | | CCVS | |
| 568 | PFATPMEAELAR | NY-ESO-1 protein | 1078 | TFNCHHAQPW | |
| | | | | HNQFV | |
| 569 | QDAPPLPVPGVLLKE | NY-ESO-1 protein | 1079 | TGAMNVAIGTIQ | |
| | FTVSGNILTIRLTAA | | | TGV | |
| | DHR | | | | |
| 570 | ILLIHCDAHLHTPMY | OR2T4, partial [Homo | 1080 | THRPGGKRGRL | |
| | | sapiens] | | AGGS | |
| 571 | LLIHCDAHLHTPMYF | OR2T4, partial [Homo | 1081 | TIYSLFYSVADQ | |
| | | sapiens] | | DAPA | |
| 572 | ACDPHSGHFV | orf | 1082 | TMLARLVLDS | |
| 573 | LFMDTLSFVCPLC | ORF putative E7 protein | 1083 | TQLRLPGWPTP | |
| | | | | VSFG | |
| 574 | IGLITVLFL | ORF28 | 1084 | TRLFPNELANF | |
| | | | | YNAV | |
| 575 | GRNSFEVRVCACPG | p53 transformation | 1085 | TSCARRDYPRA | |
| | R | suppressor, partial [Homo | | SSPN | |
| | | sapiens] | | | |
| 576 | GLAPPQHLIRV | P53_HUMAN Cellular | 1086 | VMMHGGPAHP | |
| | | tumor antigen p53 (Tumor | | GMPMS | |
| | | suppressor p53) | | | |
| | | (Phosphoprotein p53) | | | |
| | | (Antigen NY-CO-13) | | | |
| 577 | KTCPVQLWV | P53_HUMAN Cellular | 1087 | VNTTTSPANTT | |
| | | tumor antigen p53 (Tumor | | TSPV | |
| | | suppressor p53) | | | |
| | | (Phosphoprotein p53) | | | |
| | | (Antigen NY-CO-13) | | | |
| 578 | LLGRNSFEV | P53_HUMAN Cellular | 1088 | VPVAQVTMTST | |
| | | tumor antigen p53 (Tumor | | TDAD | |
| | | suppressor p53) | | | |
| | | (Phosphoprotein p53) | | | |
| | | (Antigen NY-CO-13) | | | |
| 579 | RMPEAAPPV | P53_HUMAN Cellular | 1089 | VQLRGRALGG | |
| | | tumor antigen p53 (Tumor | | GALRA | |
| | | suppressor p53) | | | |
| | | (Phosphoprotein p53) | | | |
| | | (Antigen NY-CO-13) | | | |
| 580 | YQGSYGFRL | P53_HUMAN Cellular | 1090 | VRRCLPLWALT | |
| | | tumor antigen p53 (Tumor | | LEAA | |
| | | suppressor p53) | | | |
| | | (Phosphoprotein p53) | | | |
| | | (Antigen NY-CO-13) | | | |
| 581 | YLLPAIVHI | p68 RNA helicase | 1091 | VTGGRGGWQG | |
| | | | | PSPAF | |
| 582 | QLLDGFMITL | PAS domain containing | 1092 | VTVHPTSKSTA | |
| | | protein 1 | | TSQG | |
| 583 | YLVGNVCIL | PAS domain containing | 1093 | YVSMMCNKQA | |
| | | protein 1 | | YSLAV | |
| 584 | STMPHTSGMNR | PAX-3-FKHR gene fusion, | 1094 | FYGKTILWF | |
| | | partial | | | |
| 585 | GRKFAAWAPPSFSQT | pentraxin 4 | 1095 | CLGQLSNA | |
| 586 | GMMRWCMPV | peptidase, U32 family | 1096 | GDRFCLGQLSN | |
| | | | | AHRT | |
| 587 | AVVFQDSVVFRVAPW | peptidyl arginine | 1097 | VYFFLPDHL | |
| | | deiminase, type IV [Homo | | | |
| | | sapiens] | | | |
| 588 | TSALPIIQK | Perilipin-2 | 1098 | AVMRWGMPL | |
| 589 | DQYPYLKSV | Perilipin-2 | 1099 | KVDPIGHVY | |
| 590 | IARNLTQQL | Perilipin-2 | 1100 | VMLEGEQEA | |
| 591 | SLLTSSKGQLQK | Perilipin-2 | 1101 | VQLEEEYEV | |
| 592 | TGAMNVAKGTIQTGV | perilipin-4 isoform X1 | 1102 | ETMQCSELYHM | |
| | | [Homo sapiens] | | | |
| 593 | ATAGDGLIELRK | PHB, partial | 1103 | EVIVPLSGW | |
| 594 | GSSDVIIHR | PHD and ring finger | 1104 | EVQQFLRY | |
| | | domains 1 | | | |
| 595 | PYGCLPTGDRTGLIE | phosphatidylinositol 4,5- | 1105 | QHQPNPFEV | |
| | | bisphosphate 3-kinase | | | |
| | | catalytic subunit delta | | | |
| | | isoform isoform 2 [Homo | | | |
| | | sapiens] | | | |
| 596 | SRSSSAELDRSR | phosphatidylinositol 4- | 1106 | EFEFAQFPNWY | |
| | | kinase type 2-beta | | ISTS | |
| 597 | ALGIGIYSL | phosphatidylinositol-4,5- | 1107 | RMQAASFGTFE | |
| | | bisphosphate 3-kinase | | QWVV | |
| | | catalytic subunit | | | |
| 598 | KTWGQYWQV | Pmel 17 | 1108 | SGHLLLQKLLR | |
| | | | | AKNV | |
| 599 | SIFDGRVVAK | PNAS-136 | 1109 | ASMPSSPPL | |
| 600 | DLDVKKMPL | poly [ADP-ribose] | 1110 | DYMIHIIEKW | |
| | | polymerase 3 isoform a | | | |
| 601 | SKMGKWCRHCFPCC | POTE ankyrin domain | 1111 | FICAIIVVV | |
| | R | family member F isoform | | | |
| | | X1 [Homo sapiens] | | | |
| 602 | CRGSGKSNVGTSGD | POTE22 [Homo sapiens] | 1112 | FLGAGLFLYF | |
| | H | | | | |
| 603 | SKMGKWCRHCFAWC | POTE22 [Homo sapiens] | 1113 | GAQSWLWFV | |
| | R | | | | |
| 604 | TRATKMQVI | pp65 | 1114 | GRKLFGTHF | |
| 605 | VYALPLKML | pp65 | 1115 | IPINPRRCL | |
| 606 | YSEHPTFTSQY | pp65 | 1116 | KQWLVWLFL | |
| 607 | AVQEFGLARFK | PRELI | 1117 | LDYEWGTVTF | |
| 608 | GEPIPQPARLRYVTS | prickle-like protein 2 | 1118 | RVRVMAIYK | |
| | | [Homo sapiens] | | | |
| 609 | EMQEERLKLPILSEE | probable ATP-dependent | 1119 | SILEQMHRK | |
| | | RNA helicase DHX37 | | | |
| | | [Homo sapiens] | | | |
| 610 | VMLEGEQEE | Programmed cell death | 1120 | SMACVGFFL | |
| | | protein 7 | | | |
| 611 | HIGIGLLSL | proteasome (prosome, | 1121 | TSDYLSQSY | |
| | | macropain) activator | | | |
| | | subunit 4 | | | |
| 727 | SILEDPPSI | protein asunder homolog | 1122 | VADINDHAL | |
| | | | 1123 | VYRPLHYPLL | |

[0274] In some embodiments, the methods and compositions of the disclosure are used in combination with Kymriah™ (tisagenlecleucel; Novartis) suspension for intravenous infusion, formerly CTL019.

[0275] Suitable antigens are known in the art and are available from commercial, government, and scientific sources. The antigens may be purified or partially purified polypeptides derived from tumors. The antigens can be recombinant polypeptides produced by expressing DNA encoding the polypeptide antigen in a heterologous expression system. The DNA may be in the form of vector DNA such as plasmid DNA.

[0276] In certain embodiments, antigens may be provided as single antigens or may be provided in combination. Antigens may also be provided as complex mixtures of polypeptides or nucleic acids.

### Polar Block/Linker

[0277] For the conjugate to be trafficked efficiently to the lymph node, the conjugate should remain soluble at the injection site. Therefore, a polar block linker can be included between the cargo and the lipid to increase solubility of the conjugate. The polar block can also reduce or prevent the ability of cargo, such as a peptide, from non-specifically associating with extracellular matrix proteins at the site of administration. The polar block increases the solubility of the conjugate without preventing its ability to bind to albumin. It is believed that this combination of characteristics allows the conjugate to bind to albumin present in the serum or interstitial fluid, and remain in circulation until the albumin is trafficked to, and retained in a lymph node.

[0278] The length and composition of the polar block can be adjusted based on the lipid and cargo selected.

[0279] A polar block can be used as part of any of lipid conjugates suitable for use in the methods disclosed herein, for example, amphiphilic oligonucleotide conjugates and amphiphilic ligand conjugates, which reduce cell membrane insertion/preferential portioning on albumin. Suitable polar blocks include, but are not limited to, oligonucleotides such as those discussed above, a hydrophilic polymer including but not limited to poly(ethylene glycol) (MW: 500 Da to 20,000 Da), polyacrylamide (MW: 500 Da to 20,000 Da), polyacrylic acid; a string of hydrophilic amino acids such as serine, threonine, cysteine, tyrosine, asparagine, glutamine, aspartic acid, glutamic acid, lysine, arginine, histidine, or combinations thereof polysaccharides, including but not limited to, dextran (MW: 1,000 Da to 2,000,000 Da), or combinations thereof.

[0280] The hydrophobic lipid and the linker/cargo are covalently linked. The covalent bond may be a non-cleavable linkage or a cleavable linkage. The non-cleavable linkage can include an amide bond or phosphate bond, and the cleavable linkage can include a disulfide bond, acid-cleavable linkage, ester bond, anhydride bond, biodegradable bond, or enzyme-cleavable linkage.

### Ethylene Glycol Linkers

[0281] In certain embodiments, the polar block is one or more ethylene glycol (EG) units, more preferably two or more EG units (i.e., polyethylene glycol (PEG)). For example, in certain embodiments, a lipid conjugate includes a protein or peptide (e.g., peptide antigen) and a hydrophobic lipid linked by a polyethylene glycol (PEG) molecule or a derivative or analog thereof.

[0282] In certain embodiments, protein conjugates suitable for use in the methods disclosed herein contain protein antigen linked to PEG which is in turn linked to a hydrophobic lipid, or lipid-Gn-ON conjugates, either covalently or via formation of protein-oligo conjugates that hybridize to oligo micelles.

[0283] The precise number of EG units depends on the lipid and the cargo, however, typically, a polar block can have between about 1 and about 100, between about 20 and about 80, between about 30 and about 70, or between about 40 and about 60 EG units. In certain embodiments, the polar block has between about 45 and 55 EG, units. For example, in certain embodiments, the polar block has 48 EG units. In some embodiments, the EG units are consecutive (e.g., 24 consecutive EG units).

### T Cell Receptor (TCR)

[0284] In some aspects, the disclosure provides compositions and methods to be used or performed in in conjunction with TCR modified immune cells (e.g. T cells). Methods described herein include administering to a subject a composition including an amphiphilic ligand conjugate described herein and a T cell receptor modified immune cell. In some embodiments, the TCR binds the peptide of the amphiphilic ligand conjugate, Antigenic peptides bound to MHC molecules are presented to T cells by APC(s). Recognition and engagement of such peptide-MHC complex (pMHC) by the TCR, a molecule found on the surface of T cells, results in T cell activation and response. The TCR is a heterodimer composed of two different protein chains. In most T cells (about 95%), these two protein chains are alpha (α) and beta (β) chains. However, in a small percentage of T cells (about 5%), these two protein chains are gamma and delta (γ/δ) chains. The ratio of TCRs comprised of α/β chains versus γ/δ chains may change during a diseased state (e.g., in cancer (e.g., in a tumor), infectious disease, inflammatory disease or autoimmune disease). Engagement of the TCR with pMHC activates a T cell through a series of biochemical events mediated by associated enzymes, co-receptors, specialized adaptor molecules, and activated or released transcription factors.

[0285] Each of the two chains of a TCR contains multiple copies of gene segments—a variable ‘V’ gene segment, a diversity ‘D’ gene segment, and a joining ‘J’ gene segment. The TCR alpha chain is generated by recombination of V and J segments, while the beta chain is generated by recombination of V, D, and J segments. Similarly, generation of the TCR gamma chain involves recombination of V and J gene segments, while generation of the TCR delta chain occurs by recombination of V, D, and J gene segments. The intersection of these specific regions (V and J for the alpha or gamma chain, or V, D and J for the beta or delta chain) corresponds to the CDR3 region that is important for antigen-MHC recognition. Complementarity determining regions (e.g., CDR1, CDR2, and CDR3), or hypervariable regions, are sequences in the variable domains of antigen receptors that can complement an antigen.

[0286] CD3 is a T cell co-receptor that facilitates T lymphocyte activation when simultaneously engaged with the appropriate co-stimulation (e.g., binding of a co-stimulatory molecule). A CD3 complex consists of 4 distinct chains; mammalian CD3 consists of a CD3γ chain, a CD3δ chain, and two CD3ε chains. These chains associate with a T cell receptor (TCR) and CD3ζ to generate an activation signal in T lymphocytes. A complete TCR complex includes a TCR, CD3ζ, and the complete CD3 complex.

[0287] Any immune cell may be modified with a TCR. For example, the immune cell modified with a TCR described herein may be a T cell, a B cell, a natural killer (NK) cell, a macrophage, a neutrophil, a dendritic cell, a mast cell, an eosinophil, or a basophil. In particular embodiments, the immune cell modified with a TCR is a T cell.

### Modified TCR Immune Cells

[0288] Engineered immune cell therapy is used to generate immune cells modified with TCRs that are capable of recognizing a tumor in a subject. A TCR may recognize a tumor by the antigen present on the major histocompatibility complex (MHC) the tumor cell surface. In some embodiments, immune cells (e.g., T cells, B cells, NK cells, neutrophils, eosinophils, basophils, and granulocytes) are modified to express a TCR. In some embodiments, the immune cell is a mucosal-associated invariant T (MAIT) cell. In some embodiments, the immune cell is a human MAIT cell. MAIT cells are a population of T cells that display a semi-invariant TCR and are restricted by the evolutionarily conserved major histocompatibility complex class I-related protein, MR1. In some embodiments, T cells are modified to express a TCR. In some embodiments, the modified TCR may be used to activate and expand the immune cell (e.g., T cell) and/or increase proliferation of the immune cell (e.g., T cell). In some embodiments, activating and/or expanding the immune cell may be done in vitro. In some embodiments, activating and expanding the immune cell (e.g., T cell) may decrease the size of the tumor tissue or inhibit growth of the tumor cell population or tumor tissue in the subject.

[0289] TCR modified immune cells (e.g., T cells) may display desired specificities and enhanced functionalities. For example, TCR modified immune cells (e.g., T cells) may recognize a specific tumor-associated antigen. T cells can be genetically modified to express TCRs with altered specificity. The T cell may be modified with a TCR capable of recognizing a specific tumor-associated antigen. For example, in some embodiments, T cells are modified to express a modified TCR, where the TCR binds the peptide of the amphiphilic ligand conjugate. In some embodiments, binding of the peptide of the amphiphilic ligand conjugate allows for the activation and expansion of T cells directed towards a specific tumor.

[0290] An immune cell (e.g., T cell) may be modified with a TCR by introducing a recombinant nucleic acid encoding a TCR into a patient-derived T cell to generate a TCR modified immune cell (e.g., T cell). The modified T cell may then be administered back to the subject, for example, after being activated in vitro. In some embodiments, T cells not derived from the subject are genetically modified with a TCR. For example, in some embodiments, T cells are allogeneic cells that have been engineered to be used as an “off the shelf” adoptive cell therapy.

[0291] A variety of different methods known in the art can be used to introduce any of the nucleic acids or expression vectors disclosed herein into a T cell. Nonlimiting examples of methods for introducing nucleic acid into an immune cell (e.g., T cell) include: lipofection, transfection (e.g., calcium phosphate transfection, transfection using highly branched organic compounds, transfection using cationic polymers, dendrimer-based transfection, optical transfection, particle-based transfection (e.g., nanoparticle transfection), or transfection using liposomes (e.g., cationic liposomes)), microinjection, electroporation, cell squeezing, sonoporation, protoplast fusion, impalefection, hydrodynamic delivery, gene gun, magnetofection, viral transfection, and nucleofection. Furthermore, the CRISPR/Cas9 genome editing technology known in the art can be used to introduce nucleic acids into T cells

### Immunogenic Compositions

[0292] The conjugates suitable for use in the methods disclosed herein can be used in immunogenic compositions or as components in vaccines. Typically, immunogenic compositions disclosed herein include an amphiphilic lipid conjugate including a lipid, a peptide (e.g., a tumor associated antigen), optionally a linker, and/or a TCR modified immune cell (e.g., a TCR modified T cell), where the TCR binds the peptide of the amphiphilic ligand conjugate. The administration to a subject of both an amphiphilic lipid conjugate and a TCR modified immune cell is an example of a vaccine. When administered to a subject in combination, the amphiphilic lipid conjugate and the TCR modified immune cell can be administered in separate pharmaceutical compositions, or they can be administered together in the same pharmaceutical composition. Additionally, the vaccine may include an adjuvant. The adjuvant may be administered in the same pharmaceutical composition as the amphiphilic lipid conjugate and/or the TCR modified immune cell, or the adjuvant may be administered in a separate pharmaceutical composition.

### An Immunogenic Composition Suitable for Use in the Methods Disclosed Herein

[0293] An immunogenic composition suitable for use in the methods disclosed herein can include the combination of a composition including an amphiphilic ligand conjugate and a composition including a TCR modified immune cell (e.g., a TCR modified T cell). These compositions can be combined into one composition and can be administered alone, or in combination with an adjuvant. In some embodiments, the adjuvant is an amphiphilic oligonucleotide conjugate including an immunostimulatory oligonucleotide, as described supra.

[0294] The adjuvant may be, without limitation, alum (e.g., aluminum hydroxide, aluminum phosphate); saponins purified from the bark of the Q. saponaria tree such as QS21 (a glycolipid that elutes in the 21st peak with HPLC fractionation; Antigenics, Inc., Worcester, Mass.); poly[di(carboxylatophenoxy)phosphazene] (PCPP polymer; Virus Research Institute, USA), Flt3 ligand, Leishmania elongation factor (a purified Leishmania protein; Corixa Corporation, Seattle, Wash.), ISCOMS (immunostimulating complexes which contain mixed saponins, lipids and form virus-sized particles with pores that can hold antigen; CSL, Melbourne, Australia), Pam3Cys, SB-AS4 (SmithKline Beecham adjuvant system #4 which contains alum and MPL; SBB, Belgium), non-ionic block copolymers that form micelles such as CRL 1005 (these contain a linear chain of hydrophobic polyoxypropylene flanked by chains of polyoxyethylene, Vaxcel, Inc., Norcross, Ga.), and Montanide IMS (e.g., IMS 1312, water-based nanoparticles combined with a soluble immunostimulant, Seppic).

[0295] Adjuvants may be TLR ligands, such as those discussed above. Adjuvants that act through TLR3 include, without limitation, double-stranded RNA. Adjuvants that act through TLR4 include, without limitation, derivatives of lipopolysaccharides such as monophosphoryl lipid A (MPLA; Ribi ImmunoChem Research, Inc., Hamilton, Mont.) and muramyl dipeptide (MDP; Ribi) and threonyl-muramyl dipeptide (t-MDP; Ribi); OM-174 (a glucosamine disaccharide related to lipid A; OM Pharma SA, Meyrin, Switzerland). Adjuvants that act through TLR5 include, without limitation, flagellin. Adjuvants that act through TLR7 and/or TLR8 include single-stranded RNA, oligoribonucleotides (ORN), synthetic low molecular weight compounds such as imidazoquinolinamines (e.g., imiquimod (R-837), resiquimod (R-848)). Adjuvants acting through TLR9 include DNA of viral or bacterial origin, or synthetic oligodeoxynucleotides (ODN), such as CpG ODN. Another adjuvant class is phosphorothioate containing molecules such as phosphorothioate nucleotide analogs and nucleic acids containing phosphorothioate backbone linkages.

[0296] The adjuvant can also be oil emulsions (e.g., Freund's adjuvant); saponin formulations; virosomes and viral-like particles; bacterial and microbial derivatives; immunostimulatory oligonucleotides; ADP-ribosylating toxins and detoxified derivatives; alum; BCG (Bacillus Colmette-Guérin); mineral-containing compositions (e.g., mineral salts, such as aluminium salts and calcium salts, hydroxides, phosphates, sulfates, etc.); bioadhesives and/or mucoadhesives; microparticles; liposomes; polyoxyethylene ether and polyoxyethylene ester formulations; polyphosphazene; muramyl peptides; imidazoquinolone compounds; and surface active substances (e.g., lysolecithin, pluronic polyols, polyanions, peptides, oil emulsions, keyhole limpet hemocyanin, and dinitrophenol).

[0297] Adjuvants may also include immunomodulators such as cytokines, interleukins (e.g., IL-1, IL-2, IL-4, IL-5, IL-6, IL-7, IL-12, etc.), interferons (e.g., interferon-.gamma.), macrophage colony stimulating factor, and tumor necrosis factor.

### Methods of Making Polypeptides

[0298] In some embodiments, the peptides described herein for use in the amphiphilic conjugates (e.g., tumor associated antigens) are made in transformed host cells using recombinant DNA techniques. To do so, a recombinant DNA molecule coding for the peptide is prepared. Methods of preparing such DNA molecules are well known in the art. For instance, sequences coding for the peptides could be excised from DNA using suitable restriction enzymes. Alternatively, the DNA molecule could be synthesized using chemical synthesis techniques, such as the phosphoramidate method. Also, a combination of these techniques could be used.

[0299] The methods of making polypeptides also include a vector capable of expressing the peptides in an appropriate host. The vector includes the DNA molecule that codes for the peptides operatively linked to appropriate expression control sequences. Methods of affecting this operative linking, either before or after the DNA molecule is inserted into the vector, are well known. Expression control sequences include promoters, activators, enhancers, operators, ribosomal nuclease domains, start signals, stop signals, cap signals, polyadenylation signals, and other signals involved with the control of transcription or translation.

[0300] The resulting vector having the DNA molecule thereon is used to transform an appropriate host. This transformation may be performed using methods well known in the art.

[0301] Any of a large number of available and well-known host cells may be suitable for use in the methods disclosed herein. The selection of a particular host is dependent upon a number of factors recognized by the art. These include, for example, compatibility with the chosen expression vector, toxicity of the peptides encoded by the DNA molecule, rate of transformation, ease of recovery of the peptides, expression characteristics, bio-safety, and costs. A balance of these factors must be struck with the understanding that not all hosts may be equally effective for the expression of a particular DNA sequence. Within these general guidelines, useful microbial hosts include bacteria (such as E. coli sp.), yeast (such as Saccharomyces sp.) and other fungi, insects, plants, mammalian (including human) cells in culture, or other hosts known in the art.

[0302] Next, the transformed host is cultured and purified. Host cells may be cultured under conventional fermentation conditions so that the desired compounds are expressed. Such fermentation conditions are well known in the art. Finally, the peptides are purified from culture by methods well known in the art.

[0303] The compounds may also be made by synthetic methods. For example, solid phase synthesis techniques may be used. Suitable techniques are well known in the art, and include those described in Merrifield (1973), Chem. Polypeptides, pp. 335-61 (Katsoyannis and Panayotis eds.); Merrifield (1963), J. Am. Chem. Soc. 85: 2149; Davis et al. (1985), Biochem. Intl. 10: 394-414; Stewart and Young (1969), Solid Phase Peptide Synthesis; U.S. Pat. No. 3,941,763; Finn et al. (1976), The Proteins (3rd ed.) 2: 105-253; and Erickson et al. (1976), The Proteins (3rd ed.) 2: 257-527. Solid phase synthesis is the preferred technique of making individual peptides since it is the most cost-effective method of making small peptides. Compounds that contain derivatized peptides or which contain non-peptide groups may be synthesized by well-known organic chemistry techniques.

[0304] Other methods are of molecule expression/synthesis are generally known in the art to one of ordinary skill.

[0305] The nucleic acid molecules described above can be contained within a vector that is capable of directing their expression in, for example, a cell that has been transduced with the vector. Accordingly, in addition to polypeptide mutants, expression vectors containing a nucleic acid molecule encoding a mutant and cells transfected with these vectors are among the certain embodiments.

[0306] Vectors suitable for use include T7-based vectors for use in bacteria (see, for example, Rosenberg et al., Gene 56: 125, 1987), the pMSXND expression vector for use in mammalian cells (Lee and Nathans, J. Biol. Chem. 263:3521, 1988), and baculovirus-derived vectors (for example the expression vector pBacPAKS from Clontech, Palo Alto, Calif.) for use in insect cells. The nucleic acid inserts, which encode the polypeptide of interest in such vectors, can be operably linked to a promoter, which is selected based on, for example, the cell type in which expression is sought. For example, a T7 promoter can be used in bacteria, a polyhedrin promoter can be used in insect cells, and a cytomegalovirus or metallothionein promoter can be used in mammalian cells. Also, in the case of higher eukaryotes, tissue-specific and cell type-specific promoters are widely available. These promoters are so named for their ability to direct expression of a nucleic acid molecule in a given tissue or cell type within the body. Skilled artisans are well aware of numerous promoters and other regulatory elements which can be used to direct expression of nucleic acids.

[0307] In addition to sequences that facilitate transcription of the inserted nucleic acid molecule, vectors can contain origins of replication, and other genes that encode a selectable marker. For example, the neomycin-resistance (neo^{r}) gene imparts G418 (Geneticin) resistance to cells in which it is expressed, and thus permits phenotypic selection of the transfected cells. Those of skill in the art can readily determine whether a given regulatory element or selectable marker is suitable for use in a particular experimental context.

[0308] Viral vectors that are suitable for use include, for example, retroviral, adenoviral, and adeno-associated vectors, herpes virus, simian virus 40 (SV 40), and bovine papilloma virus vectors (see, for example, Gluzman (Ed.), Eukaryotic Viral Vectors, CSH Laboratory Press, Cold Spring Harbor, N.Y.).

[0309] Prokaryotic or eukaryotic cells that contain and express a nucleic acid molecule that encodes a polypeptide mutant are also suitable for use. A cell is a transfected cell, i.e., a cell into which a nucleic acid molecule, for example a nucleic acid molecule encoding a mutant polypeptide, has been introduced by means of recombinant DNA techniques. The progeny of such a cell are also considered suitable for use in the methods disclosed herein.

[0310] The precise components of the expression system are not critical. For example, a polypeptide mutant can be produced in a prokaryotic host, such as the bacterium E. coli, or in a eukaryotic host, such as an insect cell (e.g., an Sf21 cell), or mammalian cells (e.g., COS cells, NIH 3T3 cells, or HeLa cells). These cells are available from many sources, including the American Type Culture Collection (Manassas, Va.). In selecting an expression system, it matters only that the components are compatible with one another. Artisans of ordinary skill are able to make such a determination. Furthermore, if guidance is required in selecting an expression system, skilled artisans may consult Ausubel et al. (Current Protocols in Molecular Biology, John Wiley and Sons, New York, N.Y., 1993) and Pouwels et al. (Cloning Vectors: A Laboratory Manual, 1985 Suppl. 1987).

[0311] The expressed polypeptides can be purified from the expression system using routine biochemical procedures, and can be used, e.g., conjugated to a lipid, as described herein.

### Pharmaceutical Composition and Modes of Administration

[0312] In some embodiments, an amphiphilic ligand conjugate and an immune cell modified to express a TCR are administered together (simultaneously or sequentially). In some embodiments, an amphiphilic ligand conjugate and an immune cell modified to express a modified TCR are administered together (simultaneously or sequentially). In some embodiments, the amphiphilic ligand conjugate including a lipid, a ligand of MAIT cell, and optionally a linker is administered to subject. In some embodiments, the amphiphilic ligand conjugate including a lipid, a ligand of MAIT cell is administered to the subject without an immune cell modified to express a TCR. In some embodiments, an amphiphilic ligand conjugate and an adjuvant (e.g., an amphiphilic oligonucleotide conjugate) are administered together (simultaneously or sequentially). In some embodiments, an amphiphilic ligand conjugate, an adjuvant (e.g., an amphiphilic oligonucleotide conjugate), and an immune cell modified to express a TCR are administered together (simultaneously or sequentially). In some embodiments, an amphiphilic ligand conjugate including a lipid, a ligand of MAIT cell, and optionally a linker, and an adjuvant (e.g., an amphiphilic oligonucleotide conjugate) are administered together (simultaneously or sequentially). In some embodiments, an amphiphilic ligand conjugate and an immune cell modified to express a TCR are administered separately. In some embodiments, an amphiphilic ligand conjugate and an adjuvant (e.g., an amphiphilic oligonucleotide conjugate) are administered separately. In some embodiments, an amphiphilic ligand conjugate, an adjuvant (e.g., an amphiphilic oligonucleotide conjugate) and an immune cell modified to express a TCR are administered separately.

[0313] In some embodiments, the disclosure provides for a pharmaceutical composition including an amphiphilic ligand conjugate with a pharmaceutically acceptable diluent, carrier, solubilizer, emulsifier, preservative and/or adjuvant. In some embodiments, the adjuvant is an amphiphilic oligonucleotide conjugate.

[0314] In some embodiments, acceptable formulation materials preferably are nontoxic to recipients at the dosages and concentrations employed. In certain embodiments, the formulation material(s) are for subcutaneous (s.c.) and/or intravenous (i.v.) administration. In some embodiments, the pharmaceutical composition can contain formulation materials for modifying, maintaining or preserving, for example, the pH, osmolality, viscosity, clarity, color, isotonicity, odor, sterility, stability, rate of dissolution or release, adsorption or penetration of the composition. In some embodiments, suitable formulation materials include, but are not limited to, amino acids (such as glycine, glutamine, asparagine, arginine or lysine); antimicrobials; antioxidants (such as ascorbic acid, sodium sulfite or sodium hydrogen-sulfite); buffers (such as borate, bicarbonate, Tris-HCl, citrates, phosphates or other organic acids); bulking agents (such as mannitol or glycine); chelating agents (such as ethylenediamine tetraacetic acid (EDTA)); complexing agents (such as caffeine, polyvinylpyrrolidone, beta-cyclodextrin or hydroxypropyl-beta-cyclodextrin); fillers; monosaccharides; disaccharides; and other carbohydrates (such as glucose, mannose or dextrins); proteins (such as serum albumin, gelatin or immunoglobulins); coloring, flavoring and diluting agents; emulsifying agents; hydrophilic polymers (such as polyvinylpyrrolidone); low molecular weight polypeptides; salt-forming counterions (such as sodium); preservatives (such as benzalkonium chloride, benzoic acid, salicylic acid, thimerosal, phenethyl alcohol, methylparaben, propylparaben, chlorhexidine, sorbic acid or hydrogen peroxide); solvents (such as glycerin, propylene glycol or polyethylene glycol); sugar alcohols (such as mannitol or sorbitol); suspending agents; surfactants or wetting agents (such as pluronics, PEG, sorbitan esters, polysorbates such as polysorbate 20, polysorbate 80 (polyoxyethylene (20) sorbitan monooleate), Triton X-100 (t-Octylphenoxypolyethoxyethanol), tromethamine, lecithin, cholesterol, tyloxapal); stability enhancing agents (such as sucrose or sorbitol); tonicity enhancing agents (such as alkali metal halides, preferably sodium or potassium chloride, mannitol sorbitol); delivery vehicles; diluents; excipients and/or pharmaceutical adjuvants. (Remington's Pharmaceutical Sciences, 18th Edition, A. R. Gennaro, ed., Mack Publishing Company (1995). In certain embodiments, the formulation includes PBS; 20 mM NaOAc, pH 5.2, 50 mM NaCl; and/or 10 mM NaOAc, pH 5.2, 9% Sucrose. In some embodiments, the optimal pharmaceutical composition will be determined by one skilled in the art depending upon, for example, the intended route of administration, delivery format and desired dosage. See, for example, Remington's Pharmaceutical Sciences, supra. In some embodiments, such compositions may influence the physical state, stability, rate of in vivo release and rate of in vivo clearance of the amphiphilic conjugate.

[0315] In some embodiments, the primary vehicle or carrier in a pharmaceutical composition can be either aqueous or non-aqueous in nature. For example, in some embodiments, a suitable vehicle or carrier can be water for injection, physiological saline solution or artificial cerebrospinal fluid, possibly supplemented with other materials common in compositions for parenteral administration. In some embodiments, the saline includes isotonic phosphate-buffered saline. In certain embodiments, neutral buffered saline or saline mixed with serum albumin are further exemplary vehicles. In some embodiments, pharmaceutical compositions include Tris buffer of about pH 7.0-8.5, or acetate buffer of about pH 4.0-5.5, which can further include sorbitol or a suitable substitute therefor. In some embodiments, a composition including an amphiphilic conjugate can be prepared for storage by mixing the selected composition having the desired degree of purity with optional formulation agents (Remington's Pharmaceutical Sciences, supra) in the form of a lyophilized cake or an aqueous solution. Further, in some embodiments, a composition including an amphiphilic conjugate, can be formulated as a lyophilizate using appropriate excipients such as sucrose.

[0316] In some embodiments, the pharmaceutical composition can be selected for parenteral delivery. In some embodiments, the compositions can be selected for inhalation or for delivery through the digestive tract, such as orally. The preparation of such pharmaceutically acceptable compositions is within the ability of one skilled in the art.

[0317] In some embodiments, the formulation components are present in concentrations that are acceptable to the site of administration. In some embodiments, buffers are used to maintain the composition at physiological pH or at a slightly lower pH, typically within a pH range of from about 5 to about 8.

[0318] In some embodiments, when parenteral administration is contemplated, a therapeutic composition can be in the form of a pyrogen-free, parenterally acceptable aqueous solution including an amphiphilic conjugate, in a pharmaceutically acceptable vehicle. In some embodiments, a vehicle for parenteral injection is sterile distilled water in which an amphiphilic conjugate is formulated as a sterile, isotonic solution, properly preserved. In some embodiments, the preparation can involve the formulation of the desired molecule with an agent, such as injectable microspheres, bio-erodible particles, polymeric compounds (such as polylactic acid or polyglycolic acid), beads or liposomes, that can provide for the controlled or sustained release of the product which can then be delivered via a depot injection. In some embodiments, hyaluronic acid can also be used, and can have the effect of promoting sustained duration in circulation. In some embodiments, implantable drug delivery devices can be used to introduce the desired molecule.

[0319] In some embodiments, a pharmaceutical composition can be formulated for inhalation. In some embodiments, an amphiphilic conjugate can be formulated as a dry powder for inhalation. In some embodiments, an inhalation solution including an amphiphilic conjugate can be formulated with a propellant for aerosol delivery. In some embodiments, solutions can be nebulized. Pulmonary administration is further described in PCT Publication No. WO/1994/020069, which describes pulmonary delivery of chemically modified proteins.

[0320] In some embodiments, it is contemplated that formulations can be administered orally. In some embodiments, an amphiphilic conjugate that is administered in this fashion can be formulated with or without those carriers customarily used in the compounding of solid dosage forms such as tablets and capsules. In some embodiments, a capsule can be designed to release the active portion of the formulation at the point in the gastrointestinal tract when bioavailability is maximized and pre-systemic degradation is minimized. In some embodiments, at least one additional agent can be included to facilitate absorption of the amphiphilic conjugate. In certain embodiments, diluents, flavorings, low melting point waxes, vegetable oils, lubricants, suspending agents, tablet disintegrating agents, and binders can also be employed.

[0321] In some embodiments, a pharmaceutical composition can involve an effective quantity of an amphiphilic conjugate in a mixture with non-toxic excipients which are suitable for the manufacture of tablets. In some embodiments, by dissolving the tablets in sterile water, or another appropriate vehicle, solutions can be prepared in unit-dose form. In some embodiments, suitable excipients include, but are not limited to, inert diluents, such as calcium carbonate, sodium carbonate or bicarbonate, lactose, or calcium phosphate; or binding agents, such as starch, gelatin, or acacia; or lubricating agents such as magnesium stearate, stearic acid, or talc.

[0322] Additional pharmaceutical compositions will be evident to those skilled m the art, including formulations involving an amphiphilic conjugate in sustained- or controlled-delivery formulations. In some embodiments, techniques for formulating a variety of other sustained- or controlled-delivery means, such as liposome carriers, bio-erodible microparticles or porous beads and depot injections, are also known to those skilled in the art. See for example, PCT Application No. PCT/US93/00829 which describes the controlled release of porous polymeric microparticles for the delivery of pharmaceutical compositions. In some embodiments, sustained-release preparations can include semipermeable polymer matrices in the form of shaped articles, e.g., films, or microcapsules. Sustained release matrices can include polyesters, hydrogels, polylactides (U.S. Pat. No. 3,773,919 and EP 058,481), copolymers of L-glutamic acid and gamma ethyl-L-glutamate (Sidman et al., Biopolymers, 22:547-556 (1983)), poly (2-hydroxyethyl-methacrylate) (Langer et al., J. Biomed. Mater. Res., 15: 167-277 (1981) and Langer, Chem. Tech., 12:98-105 (1982)), ethylene vinyl acetate (Langer et al., supra) or poly-D(−)-3-hydroxybutyric acid (EP 133,988). In some embodiments, sustained release compositions can also include liposomes, which can be prepared by any of several methods known in the art. See, e.g., Eppstein et al, Proc. Natl. Acad. Sci. USA, 82:3688-3692 (1985); EP 036,676; EP 088,046 and EP 143,949.

[0323] The pharmaceutical composition to be used for in vivo administration typically is sterile. In some embodiments, this can be accomplished by filtration through sterile filtration membranes. In certain embodiments, where the composition is lyophilized, sterilization using this method can be conducted either prior to or following lyophilization and reconstitution. In some embodiments, the composition for parenteral administration can be stored in lyophilized form or in a solution. In some embodiments, parenteral compositions generally are placed into a container having a sterile access port, for example, an intravenous solution bag or vial having a stopper pierceable by a hypodermic injection needle.

[0324] In some embodiments, once the pharmaceutical composition has been formulated, it can be stored in sterile vials as a solution, suspension, gel, emulsion, solid, or as a dehydrated or lyophilized powder. In some embodiments, such formulations can be stored either in a ready-to-use form or in a form (e.g., lyophilized) that is reconstituted prior to administration.

[0325] In some embodiments, kits are provided for producing a single-dose administration unit. In some embodiments, the kit can contain both a first container having a dried protein and a second container having an aqueous formulation. In some embodiments, kits containing single and multi-chambered pre-filled syringes (e.g., liquid syringes and syringes containing a lyophilized therapeutic) are included.

[0326] In some embodiments, the effective amount of a pharmaceutical composition including an amphiphilic conjugate to be employed therapeutically will depend, for example, upon the therapeutic context and objectives. One skilled in the art will appreciate that the appropriate dosage levels for treatment, according to certain embodiments, will thus vary depending, in part, upon the molecule delivered, the indication for which an amphiphilic conjugate is being used, the route of administration, and the size (body weight, body surface or organ size) and/or condition (the age and general health) of the patient. In some embodiments, the clinician can titer the dosage and modify the route of administration to obtain the optimal therapeutic effect.

[0327] In some embodiments, the frequency of dosing will take into account the pharmacokinetic parameters of the amphiphilic conjugate, in the formulation used. In some embodiments, a clinician will administer the composition until a dosage is reached that achieves the desired effect. In some embodiments, the composition can therefore be administered as a single dose, or as two or more doses (which may or may not contain the same amount of the desired molecule) over time, or as a continuous infusion via an implantation device or catheter. Further refinement of the appropriate dosage is routinely made by those of ordinary skill in the art and is within the ambit of tasks routinely performed by them. In some embodiments, appropriate dosages can be ascertained through use of appropriate dose-response data.

[0328] In some embodiments, the route of administration of the pharmaceutical composition is in accord with known methods, e.g., orally, through injection by intravenous, intraperitoneal, intracerebral (intra-parenchymal), intracerebroventricular, intramuscular, subcutaneously, intra-ocular, intraarterial, intraportal, or intralesional routes; by sustained release systems or by implantation devices. In certain embodiments, the compositions can be administered by bolus injection or continuously by infusion, or by implantation device. In certain embodiments, individual elements of the combination therapy may be administered by different routes.

[0329] In some embodiments, the composition can be administered locally via implantation of a membrane, sponge or another appropriate material onto which the desired molecule has been absorbed or encapsulated. In some embodiments, where an implantation device is used, the device can be implanted into any suitable tissue or organ, and delivery of the desired molecule can be via diffusion, timed-release bolus, or continuous administration. In some embodiments, it can be desirable to use a pharmaceutical composition including an amphiphilic conjugate in an ex vivo manner. In such instances, cells, tissues and/or organs that have been removed from the patient are exposed to a pharmaceutical composition including an amphiphilic conjugate, after which the cells, tissues and/or organs are subsequently implanted back into the patient.

[0330] In some embodiments, an amphiphilic conjugate can be delivered by implanting certain cells that have been genetically engineered, using methods such as those described herein, to express and secrete the polypeptides. In some embodiments, such cells can be animal or human cells, and can be autologous, heterologous, or xenogeneic. In some embodiments, the cells can be immortalized. In some embodiments, in order to decrease the chance of an immunological response, the cells can be encapsulated to avoid infiltration of surrounding tissues. In some embodiments, the encapsulation materials are typically biocompatible, semi-permeable polymeric enclosures or membranes that allow the release of the protein product(s) but prevent the destruction of the cells by the patient's immune system or by other detrimental factors from the surrounding tissues.

### Methods

[0331] In some embodiments, the disclosure provides methods of expanding an immune cell expressing a T cell receptor in vivo in a subject, including administering a composition including an amphiphilic lipid conjugate described herein.

[0332] In some embodiments, the disclosure provides methods of stimulation proliferation of an immune cell expressing a T cell receptor in vivo in a subject, including administering a composition having an amphiphilic lipid conjugate described herein.

[0333] In some embodiments, the disclosure provides methods of activating, proliferating, phenotypically maturing, or inducing acquisition of cytotoxic function of a TCR T cell in vitro, including culturing the TCR T cell in the presence of a dendritic cell having an amphiphilic ligand conjugate described herein.

[0334] In some embodiments, the disclosure provides methods for treating a subject having a disease, disorder or condition associated with expression or elevated expression of an antigen, including administering to the subject an immune cell expressing a TCR targeted to the antigen, and an amphiphilic lipid conjugate.

[0335] In some embodiments, the subject is administered the immune cell expressing a TCR prior to receiving the amphiphilic lipid conjugate. In some embodiments, the subject is administered the immune cell expressing a TCR after receiving the amphiphilic lipid conjugate. In some embodiments, the subject is administered the immune cell expressing a TCR and the amphiphilic lipid conjugate sequentially or simultaneously.

[0336] In some embodiments, the disclosure provides a method of stimulating an immune response to a target cell population or target tissue in a subject including administering to the subject an amphiphilic ligand conjugate including a lipid, a ligand for a MAIT cell, and, optionally, a linker. In some embodiments, the method of stimulating an immune response to a target cell population or target tissue in a subject including administering to the subject an amphiphilic ligand conjugate including a lipid, a ligand for a MAIT cell, and, optionally, a linker, does not include administering an immune cell expressing a TCR to the subject. Conjugating a cargo, such as a peptide, to an albumin-binding domain can increase delivery and accumulation of the cargo to the lymph nodes, as described in U.S. Pat. No. 9,107,904 which is incorporated herein by reference in its entirety.

[0337] Methods for measuring expansion or proliferation of cells are known in the art. For example, the number of cells can be measured by introducing a dye (e.g., crystal violet) into cells, and measuring the dilution of the dye over time. Dilution indicates cell proliferation.

### Cancer and Cancer Immunotherapy

[0338] In some embodiments, the amphiphilic ligand conjugate and TCR modified immune cells (e.g., TCR modified T cells) described herein, are useful for treating a disorder associated with abnormal apoptosis or a differentiative process (e.g., cellular proliferative disorders (e.g., hyperproliferative disorders) or cellular differentiative disorders, such as cancer). Non-limiting examples of cancers that are amenable to treatment with the methods of the present invention are described below.

[0339] Examples of cellular proliferative and/or differentiative disorders include cancer (e.g., carcinoma, sarcoma, metastatic disorders or hematopoietic neoplastic disorders, e.g., leukemias). A metastatic tumor can arise from a multitude of primary tumor types, including but not limited to those of prostate, colon, lung, breast, bladder, rectum, stomach, skin, kidney, cervix, and liver. Accordingly, the compositions used herein including an amphiphilic ligand conjugate can be administered to a patient who has cancer.

[0340] As used herein, we may use the terms “cancer” (or “cancerous”), “hyperproliferative,” and “neoplastic” to refer to cells having the capacity for autonomous growth (i.e., an abnormal state or condition characterized by rapidly proliferating cell growth). Hyperproliferative and neoplastic disease states may be categorized as pathologic (i.e., characterizing or constituting a disease state), or they may be categorized as non-pathologic (i.e., as a deviation from normal but not associated with a disease state). The terms are meant to include all types of cancerous growths or oncogenic processes, metastatic tissues or malignantly transformed cells, tissues, or organs, irrespective of histopathologic type or stage of invasiveness. “Pathologic hyperproliferative” cells occur in disease states characterized by malignant tumor growth. Examples of non-pathologic hyperproliferative cells include proliferation of cells associated with wound repair.

[0341] The terms “cancer” or “neoplasm” are used to refer to malignancies of the various organ systems, including those affecting the lung, breast, brain, stomach, liver, skin, thyroid, lymph glands and lymphoid tissue, gastrointestinal organs, and the genitourinary tract (e.g., bladder, kidney, and cervix), as well as to adenocarcinomas which are generally considered to include malignancies such as most colon cancers, renal-cell carcinoma, prostate cancer and/or testicular tumors, non-small cell carcinoma of the lung, cancer of the small intestine and cancer of the esophagus.

[0342] The term “carcinoma” is art recognized and refers to malignancies of epithelial or endocrine tissues including respiratory system carcinomas, gastrointestinal system carcinomas, genitourinary system carcinomas, testicular carcinomas, breast carcinomas, prostatic carcinomas, endocrine system carcinomas, and melanomas. The amphiphilic ligand conjugate can be used to treat patients who have, who are suspected of having, or who may be at high risk for developing any type of cancer, including renal carcinoma or melanoma, or any viral disease. Exemplary carcinomas include those forming from tissue of the cervix, lung, prostate, breast, head and neck, colon and ovary. The term also includes carcinosarcomas, which include malignant tumors composed of carcinomatous and sarcomatous tissues. An “adenocarcinoma” refers to a carcinoma derived from glandular tissue or in which the tumor cells form recognizable glandular structures.

[0343] Additional examples of proliferative disorders include hematopoietic neoplastic disorders. As used herein, the term “hematopoietic neoplastic disorders” includes diseases involving hyperplastic/neoplastic cells of hematopoietic origin, e.g., arising from myeloid, lymphoid or erythroid lineages, or precursor cells thereof. Preferably, the diseases arise from poorly differentiated acute leukemias (e.g., erythroblastic leukemia and acute megakaryoblastic leukemia). Additional exemplary myeloid disorders include, but are not limited to, acute promyeloid leukemia (APML), acute myelogenous leukemia (AML) and chronic myelogenous leukemia (CML) (reviewed in Vaickus, L. (1991) Crit. Rev. in Oncol./Hemotol. 11:267-97); lymphoid malignancies include, but are not limited to acute lymphoblastic leukemia (ALL) which includes B-lineage ALL and T-lineage ALL, chronic lymphocytic leukemia (CLL), prolymphocytic leukemia (PLL), hairy cell leukemia (HLL) and Waldenstrom's macro globulinemia (WM). Additional forms of malignant lymphomas include, but are not limited to non-Hodgkin lymphoma and variants thereof, peripheral T cell lymphomas, adult T cell leukemia/lymphoma (ATL), cutaneous T cell lymphoma (CTCL), large granular lymphocytic leukemia (LGF), Hodgkin's disease and Reed-Sternberg disease.

[0344] It will be appreciated by those skilled in the art that amounts for an amphiphilic conjugate and TCR modified immune cells that are sufficient to reduce tumor growth and size, or a therapeutically effective amount, will vary not only on the particular compound or composition selected, but also with the route of administration, the nature of the condition being treated, and the age and condition of the patient, and will ultimately be at the discretion of the patient's physician or pharmacist. The length of time during which the compound used in the instant method will be given varies on an individual basis.

[0345] In some embodiments, the disclosure provides methods of reducing or decreasing the size of a tumor, or inhibiting a tumor growth in a subject in need thereof, including administering to the subject an amphiphilic lipid conjugate and a TCR modified T cell described herein to a subject. In some embodiments, the disclosure provides methods for inducing an anti-tumor response in a subject with cancer, including administering to the subject an amphiphilic lipid conjugate and a TCR modified immune cell described herein to a subject.

[0346] In some embodiments, the disclosure provides methods for stimulating an immune response to a target cell population or target tissue expressing an antigen in a subject, including administering an immune cell expressing a TCR targeted to the antigen, and an amphiphilic lipid conjugate. In some embodiments, the immune response is a T cell, a TIL (e.g., T cell, B cell, or an NK cell), an NK cell, an NKT cell, a gdT cell, a macrophage, a neutrophil, a dendritic cell, a mast cell, an eosinophil, or a basophil mediated immune response. In some embodiments, the immune response is an anti-tumor immune response. In some embodiments, the target cell population or target tissue is tumor cells or tumor tissue.

[0347] It will be appreciated by those skilled in the art that reference herein to treatment extends to prophylaxis as well as the treatment of the noted cancers and symptoms.

### Kits

[0348] A kit can include an amphiphilic ligand conjugate and a TCR modified immune cell (e.g., TCR modified T cells), as disclosed herein, and instructions for use. The kits may include, in a suitable container, an amphiphilic ligand conjugate, a TCR modified immune cell, one or more controls, and various buffers, reagents, enzymes and other standard ingredients well known in the art. In some embodiments, the kits further include an adjuvant. Accordingly, in some embodiments, the amphiphilic ligand conjugate and the TCR modified immune cell are in the same vial. In some embodiments, the amphiphilic ligand conjugate and the TCR modified immune cell are in separate vials. Furthermore, in some embodiments, the amphiphilic ligand conjugate and adjuvant are in the same vial. In some embodiments, the amphiphilic ligand conjugate and adjuvant are in separate vials. In some embodiments, the TCR immune cell and adjuvant are in the same vial. In some embodiments, the TCR immune cell and the adjuvant are in separate vials.

[0349] The container can include at least one vial, well, test tube, flask, bottle, syringe, or other container means, into which an amphiphilic ligand conjugate may be placed, and in some instances, suitably aliquoted. When an additional component is provided, the kit can contain additional containers into which this compound may be placed. The kits can also include a means for containing an amphiphilic ligand conjugate, a TCR modified immune cell, and any other reagent containers in close confinement for commercial sale. Such containers may include injection or blow-molded plastic containers into which the desired vials are retained. Containers and/or kits can include labeling with instructions for use and/or warnings.

[0350] In some embodiments, the disclosure provides a kit including a container including a composition including an amphiphilic ligand conjugate, a TCR modified immune cell (e.g., a TCR modified T cell), an optional pharmaceutically acceptable carrier, and a package insert including instructions for administration of the composition for treating or delaying progression of cancer in an individual receiving therapy with an immune cell expressing a T cell receptor, wherein the amphiphilic ligand conjugate includes a lipid, a peptide (e.g., a tumor associated antigen), and optionally a linker. In some embodiments, the kit further includes an adjuvant and instructions for administration of the adjuvant for treating or delaying progression of cancer in an individual receiving therapy with a TCR modified immune cell (e.g., a TCR modified T cell).

[0351] In some embodiments, the disclosure provides a kit including a medicament including a composition including an amphiphilic ligand conjugate, a TCR modified immune cell (e.g., a TCR modified T cell), an optional pharmaceutically acceptable carrier, and a package insert including instructions for administration of the medicament alone or in combination with a composition including an adjuvant and an optional pharmaceutically acceptable carrier, for treating or delaying progression of cancer, wherein the amphiphilic ligand conjugate includes a lipid, a peptide (e.g., a tumor associated antigen), and optionally a linker.

[0352] In some embodiments, the disclosure provides a kit including a container including a composition including an amphiphilic ligand conjugate, a TCR modified immune cell (e.g., a TCR modified T cell), an optional pharmaceutically acceptable carrier, and a package insert including instructions for administration of composition vaccine for expanding an immune cell expressing a T cell receptor in a subject, wherein the amphiphilic ligand conjugate includes a lipid, a peptide (e.g., a tumor associated antigen), and optionally a linker. In some embodiments, the kit further includes an adjuvant and instructions for administration of the adjuvant for expanding a TCR modified immune cell (e.g., a TCR modified T cell).

### EXAMPLES

[0353] Below are examples of specific embodiments for making the constructs and carrying out the methods described herein. These examples are provided for illustrative purposes only, and are not intended to limit the scope of the present invention in any way.

### Example 1. Vaccine Treatment for Boosting of TCR T Cells In Vivo

[0354] 6-8 week old C57BL/6 mice were inoculated subcutaneously with 5×10⁵ B116F110 melanoma tumor cells on day −7. On day −1, tumors were measured with calipers and mice with equal tumor burden were selected for treatment. Mice were then randomized into different treatment cohorts. On day −1, mice were treated subcutaneously via tail base with either PBS, soluble vaccine including 10 μg of soluble gp100 peptide, or amphiphile vaccine including 10 μg of amphiphilic gp100 peptide and 1 nmol amphiphilic CpG. This was followed by tail vein intravenous injection of 1×10⁶ or 5×10⁶ T cells freshly isolated from splenocytes of 6-8 week old pmel-1 mice [B6.Cg-Thy1^{a}/CyTg(TcraTcrb)8Rest/J] via a negative T cell isolation kit on day 0. Subsequent booster doses of vaccine were given two times a week for two weeks via subcutaneous tail base injection on days 3, 7, 10, and 14.

[0355] On days 5 and 19 post T cell infusion, whole blood was collected from mice via retro-orbital bleed. Red blood cells were lysed and T cells were washed with PBS and used for subsequent flow cytometry analysis. Adoptively transferred pmel T cells were identified by staining with murine anti-CD3, anti-CD4, anti-CD8, and anti-Thy1.1 antibodies by flow cytometry on a Cytoflex S Flow Cytometer (Beckman Coulter) for pmel T cells collected on day 5 (FIG. 1A) and day 19 (FIG. 1B). Overall survival and tumor volume were recorded over time (FIGS. 2A and 2B respectively). Mice were euthanized when tumor growth led to a volume greater than 1,000 mm³ by V=(0.5ab² where a is the longest length and b is the shortest length. The investigator was blinded when assessing the outcome. These results show that the amphiphilic vaccine expands tumor specific TCR T cells in vivo and that boosting with amphiphilic vaccine potently enhances TCR-T therapy to eliminate established solid tumors.

[0356] In another experiment, mice which had previously rejected a tumor following adoptive T cell transfer and amphiphile vaccine and a tumor naïve mouse control group were challenged with a second 5×10⁵ dose of B116F110 melanoma tumor cells on day 75 post initial adoptive transfer. No subsequent adoptive transfer or vaccination was performed. Peripheral blood was collected weekly, on days 75, 82, 89, and 96, following tumor implantation to analyze for T cells present in circulating blood. On days 0, 7, 14, and 21 post secondary tumor challenge, whole blood was collected from mice via retro-orbital bleed. Red blood cells were lysed and T cells were washed with PBS and used for subsequent flow cytometry analysis (FIGS. 3A-3D). Adoptively transferred pmel T cells were identified by staining with murine anti-CD3, anti-CD4, anti-CD8, and anti-Thy1.1 antibodies by flow cytometry on a Cytoflex S Flow Cytometer (Beckman Coulter). Overall mouse survival and tumor volume were recorded (FIGS. 4A and 4B respectively). Mice were euthanized when tumor growth led to a volume greater than 1,000 mm³ by V=(0.5ab² where a is the longest length and b is the shortest length. The investigator was blinded when assessing the outcome. These results show that boosting with an amphiphilic vaccine induces durable TCT-T cell responses and protection that lasts after a secondary tumor challenge.

[0357] On days 7 and 14 post secondary tumor challenge, whole blood was collected from mice via retro-orbital bleed. Red blood cells were lysed and T cells were washed with PBS and used for subsequent flow cytometry analysis (FIGS. 5A and 5B). Adoptively transferred pmel T cells were identified by staining with murine anti-CD3, anti-CD4, anti-CD8, and anti-Thy1.1 antibodies by flow cytometry on a Cytoflex S Flow Cytometer (Beckman Coulter). Intracellular Cytokine Staining (ICS) was performed on day 14 post secondary tumor challenge by plating cells in a 96-well round bottom tissue culture plate and pulsing with a pool of Trp1 and Trp2 peptides at 5 μg of peptide per well overnight for 18 hours. Cells were then stained with murine anti-CD3, anti-CD4, anti-CD8, and anti-Thy1.1 antibodies and fixed according to manufacturer's instructions. Following this, the cells were washed multiple times, permeabilized, and stained with murine anti-Interferon gamma and anti-TNF alpha antibodies to analyze peptide specific cytokine secretion of peripheral blood T cells, see FIG. 5C. Tumor overall survival and tumor volume were recorded (FIGS. 6A and 6B respectively). These results show that boosting with amphiphilic vaccine induces durable TCR-T cell responses and protection lasting after a secondary challenge with a high tumor burden.

[0358] In another experiment, 6-8 week old C57BL/6 mice were inoculated subcutaneously with 5×10⁵ B116F110 melanoma tumor cells on day −7. On day −1, tumors were measured with calipers and mice with equal tumor burden were selected for treatment. Mice were then randomized into different treatment cohorts. On day −1, mice were treated subcutaneously via tail base with PBS, soluble vaccine including 10 μg of soluble gp100 peptide, or amphiphile vaccine including 10 μg of amphiphilic gp100 peptide and 1 nmol amphiphilic CpG. This was followed by tail vein intravenous injection of 1×10⁶ or 5×10⁶ T cells freshly isolated from splenocytes of 6-8 week old pmel-1 mice [B6.Cg-Thy1^{a}/CyTg(TcraTcrb)8Rest/J] via a negative T cell isolation kit (StemCell) on day 0. A subsequent booster dose of vaccine was given on day 3 via subcutaneous tail base injection. Mice were euthanized on day 7 post adoptive T cell transfer and tumors, peripheral blood, and inguinal lymph nodes were harvested for analysis. On day 7 post adoptive transfer, tumor samples were excised, weighed, mechanically dissociated, and passed through a 70 μm cell strainer. The homogenate was spun down at 1,500 RPM for 5 minutes at 4° C. to pellet the cells. Total tumor cells were counted and an aliquot was stained for flow cytometry analysis, see FIG. 7. After cells were counted and aliquots were processed for intracellular flow cytometry analysis, cells were pelleted and resuspended in 10% FBS/RPMI with Golgi plug for 6 hours at 37° C. Murine anti-CD3, anti-CD4, anti-CD8, anti-Thy1.1, anti-PD-1, anti-TIM-3, and anti-LAG-3 antibodies were used to identify the activation and exhaustion status of CD8+ T cells within the tumor sample by flow cytometry on a Cytoflex S Flow Cytometer (Beckman Coulter), see FIGS. 8A, 8B, 9 and 10. These results indicate that amphiphilic vaccination expands tumor specific TCR T cells, including activating and expanding CD8+ cells, within the tumor. Using this method the number of naïve, central memory (CM), and effector T cells per mg of tumor was characterized (FIG. 11). These results show that the amphiphilic vaccine expands effector T cells within the tumor. Following this, the cells were washed multiple times, permeabilized, stained with either murine anti-Ki67 or murine anti-Interferon gamma and anti-TNF alpha antibodies, and run on a Cytoflex S Flow Cytometer (Beckman Coulter) to analyze Ki67 levels or cytokine secretion of T cells within the tumor samples (FIGS. 12A and 12B). These results show that the amphiphilic vaccine induces proliferation and cytokine secretion of CD8+ T cells within the tumor. ICS was also performed on day 7 post T cell transfer by plating isolated cells from tumor homogenate in a 96-well round bottom tissue culture plate and pulsing with EGP peptides at 5 μg of peptide per well overnight for 18 hours. Cells were then stained with murine anti-CD3, anti-CD4, anti-CD8, and anti-Thy1.1 antibodies and fixed according to manufacturer's instructions. Following this, the cells were washed multiple times, permeabilized, stained with murine anti-Interferon gamma and anti-TNF alpha antibodies, and run on a Cytoflex S Flow Cytometer (Beckman Coulter) to analyze peptide specific cytokine secretion of T cells within the tumor samples (FIG. 13), where the results show that amphiphilic vaccination promoted tumor antigen specific cytokine section of tumor resident T cells. Additionally, ICS was performed on day 7 post T cell transfer by plating isolated cells from tumor homogenate in a 96-well round bottom tissue culture plate and pulsing with either Trp1 or Trp2 peptides at 5 μg of peptide per well overnight for 18 hours. Cells were then stained with murine anti-CD3, anti-CD4, anti-CD8, and anti-Thy1.1 antibodies and fixed according to manufacturer's instructions. Following this, the cells were washed multiple times, permeabilized, stained with murine anti-Interferon gamma and anti-TNF alpha antibodies, and run on a Cytoflex S Flow Cytometer (Beckman Coulter) to analyze peptide specific cytokine secretion of T cells within the tumor samples (FIGS. 14A and 14B). These results indicate that the amphiphilic vaccine induced epitope spread among CD8+ T cells within the tumor.

[0359] Also, on day 7 post adoptive transfer, peripheral blood was collected via retro-orbital bleed. Red blood cells were lysed and T cells were washed with PBS and used for subsequent flow cytometry analysis. Total cells were counted and an aliquot was stained for flow cytometry analysis (FIG. 15), where the results show that amphiphilic vaccination expands tumor specific TCR T cells in vivo in the peripheral blood. Murine anti-CD3, CD4, CD8 and anti-Thy1.1 antibodies were used to identify adoptively transferred pmel T cells in peripheral blood by flow cytometry on a Cytoflex S Flow Cytometer (Beckman Coulter) (FIG. 16). These results show that amphiphilic vaccination activates T cells in the peripheral blood. ICS was also performed on day 7 post T cell transfer by plating isolated cells from peripheral blood in a 96-well round bottom tissue culture plate and pulsing with EGP peptides at 5 μg of peptide per well overnight for 18 hours. Cells were then stained with murine anti-CD3, anti-CD4, anti-CD8, and anti-Thy1.1 antibodies and fixed according to manufacturer's instructions. Following this, the cells were washed multiple times, permeabilized, stained with murine anti-Interferon gamma and anti-TNF alpha antibodies, and run on a Cytoflex S Flow Cytometer (Beckman Coulter) to analyze peptide specific cytokine secretion of peripheral blood T cells (FIG. 17). The results indicate that amphiphilic vaccination induces tumor specific cytokine secretion of peripheral blood T cells. ICS was performed on day 7 post T cell transfer by plating isolated cells from peripheral blood in a 96-well round bottom tissue culture plate and pulsing with either Trp1 or Trp2 peptides at 5 μg of peptide per well overnight for 18 hours. Cells were then stained with murine anti-CD3, anti-CD4, anti-CD8, and anti-Thy1.1 antibodies and fixed according to manufacturer's instructions. Following this, the cells were washed multiple times, permeabilized, stained with murine anti-Interferon gamma and anti-TNF alpha antibodies, and run on a Cytoflex S Flow Cytometer (Beckman Coulter) to analyze peptide specific cytokine secretion of peripheral blood T cells (FIGS. 18A and 18B), which show that amphiphilic gp100 leads to epitope spread among T cells. On day 7 post adoptive transfer, inguinal lymph nodes (LN) were excised, weighed, mechanically dissociated, and passed through a 70 μm cell strainer. The homogenate was spun down at 1,500 RPM for 5 minutes at 4° C. to pellet the cells. Total cells were counted and an aliquot was stained for flow cytometry analysis (FIG. 20). Murine anti-CD3, anti-CD4, anti-CD8 and anti-Thy1.1 antibodies were used to identify the CD8+ T cells within the tumor sample by flow cytometry on a Cytoflex S Flow Cytometer (Beckman Coulter) (FIG. 19). These results indicate that the amphiphilic vaccine expands tumor specific TCR T cells, including CD*+ T cells, in vivo within the lymph nodes.

### Example 2. Stimulation of T Cells In Vitro

[0360] DC2.4, an immortalized dendritic cell line, was labeled with nothing, soluble gp100 peptides, or amphiphilic gp100 peptides overnight for 18 hours. The next day, naïve pmel T cells were isolated from splenocytes of 6-8 week old pmel-1 mice [B6.Cg-Thy1a/CyTg(TcraTcrb)8Rest/J] via a negative T cell isolation kit (StemCell). DC2.4 cells were washed 3 times and cultured with the naïve pmel T cells at a 1:1 ratio overnight for 24 hours.

[0361] On day 1 after the co-culture was started, pmel T cells were counted and characterized by flow cytometry on a Cytoflex S flow cytometer (Beckman Coulter) after staining with murine anti-CD3, anti-CD4, anti-CD8, anti-Thy1.1, anti-CD25, and anti-CD69 antibodies (FIG. 21A). Additionally, the cytolytic capacity of the pmel T cells post co-culture was assessed through a 24 hour luciferase killing assay. 5×10⁴ B16F10 tumor cells expressing firefly luciferase were cocultured with adoptively transferred T cells at various effector-to-target ratios in triplicates in black-walled 96-well plates in a total volume of 200 μL of cell media. Target cells alone were plated at the same cell density to determine the maximal luciferase expression as a reference (max signal). 24 hours later, One-Glo reagent (Promega) was added to each well. Emitted luminescence of each sample (sample signal) was detected by a Synergy H1 Hybrid plate reader (BioTek). Percent lysis was determined as [1−(sample signal/max signal)]×100, see FIG. 21B.

[0362] In another experiment, naïve pmel T cells were isolated from splenocytes of 6-8 week old pmel-1 mice [B6.Cg-Thy1^{a}/CyTg(TcraTcrb)8Rest/J]. Pmel-1 spleens were harvested and following tissue dissociation and red blood cell lysis, T cells were isolated by negative bead selection and subsequently activated with CD3/CD28 Dynabeads at a bead:cell ratio of 1:2 (Invitrogen). Cells were expanded in vitro by culturing in RPMI1640 supplemented with 10% heat-inactivated FBS, sodium pyruvate, 1% penicillin/streptomycin, 2-mercaptoethanol, and 100 IU/mL of recombinant human IL2. 24 and 48 hours after initial expansion, T cells were spinoculated with viral supernatant collected from mCherry transfected Phoenix-ECO cells. Murine T cells were transduced by centrifugation on RetroNectin coated plates with retroviral supernatant from viral packaging cells. Transduction efficiency was confirmed by expression of mCherry by flow cytometry on a Cytoflex S flow cytometer (Beckman Coulter).

[0363] Transduced T cells were rested for 72 hours. On day 0, before the co-culture was started, pmel T cells were counted and characterized by flow cytometry on a Cytoflex S flow cytometer (Beckman Coulter) after staining with murine anti-CD3, anti-CD4, anti-CD8, anti-CD25, and anti-CD69 antibodies. DC2.4, an immortalized dendritic cell line, was labeled with nothing, soluble, or amp GP100 peptides overnight for 18 hours. DC2.4 cells were washed 3 times and cultured with the transduced and rested pmel T cells at a 1:1 ratio overnight for 24 hours.

[0364] On Day 1 after the co-culture was started, pmel T cells were counted and characterized by flow cytometry on a Cytoflex S flow cytometer (Beckman Coulter) after staining with murine anti-CD3, anti-CD4, anti-CD8, anti-Thy1.1, anti-CD25, and anti-CD69 antibodies (FIG. 22A). Additionally, the cytolytic capacity of the pmel T cells post co-culture was assessed through a 24 hour luciferase killing assay. 5×10⁴ B16F10 tumor cells expressing firefly luciferase were cocultured with adoptively transferred T cells at various effector-to-target ratios in triplicates in black-walled 96-well plates in a total volume of 200 μL of cell media. Target cells alone were plated at the same cell density to determine the maximal luciferase expression as a reference (max signal). 24 hours later, One-Glo reagent (Promega) was added to each well. Emitted luminescence of each sample (sample signal) was detected by a Synergy H1 Hybrid plate reader (BioTek). Percent lysis was determined as [1−(sample signal/max signal)]×100, see FIG. 22B. These results show that the naïve pmel T cells were activated in vitro with the amphiphilic gp100 labeled DC2.4s.

### Example 3. Activation of Dendritic Cells in Lymph Nodes

[0365] 6-8 week old C57BL/6 mice were vaccinated subcutaneously via tail base injection with either PBS, soluble vaccine including 10 μg of soluble gp100 peptide, or amphiphile vaccine including 10 μg of amphiphilic gp100 peptide and 1 nmol amphiphilic CpG. After 48 hours, the mice were euthanized and inguinal lymph nodes were extracted and mechanically dissociated and filtered through a 70 μm cell strainer to form a lymph node homogenate. The homogenate was spun down at 1,500 RPM for 5 minutes at 4° C. to pellet the cells. Total cells were counted and an aliquot was stained for flow cytometry analysis. Murine anti-CD3, anti-CD19, anti-F4/80, anti-CD11b, anti-CD11c, anti-MHC Class II, anti-CD40, anti-CD80, and anti-CD86 antibodies were used to analyze the activation of murine dendritic cells in the lymph nodes of vaccinated mice by flow cytometry on a Cytoflex S Flow Cytometer (Beckman Coulter), see FIG. 23. These results indicate that boosting with the amphiphilic vaccine enhances the activation of the dendritic cells in the lymph nodes.

[0366] Simultaneously, naïve pmel T cells were isolated from splenocytes of 6-8 week old pmel-1 mice [B6.Cg-Thy1^{a}/CyTg(TcraTcrb)8Rest/J] via a negative T cell isolation kit (StemCell). The lymph node homogenate was cultured with the naïve pmel T cells at a 1:1 ratio overnight for 24 hours to activate the T cells. After 24 hour co-culture, the supernatant fluid was collected and analyzed for T cell cytokine production using a Th17 murine cytokine kit on a Luminex LX200 analyzer (Millipore) (FIG. 25A). On Days 1, 3, and 6 after the co-culture was started, pmel T cells were counted for proliferation analysis (FIG. 24) and characterized by flow cytometry on a Cytoflex S flow cytometer (Beckman Coulter) after staining with murine anti-CD3, anti-CD4, anti-CD8, anti-Thy1.1, anti-CD25, and anti-CD69 antibodies, as shown in FIG. 25B. These results indicate that boosting with the amphiphilic vaccine in the lymph nodes enhances proliferation and activation of TCR T cells.

[0367] In another experiment, naïve pmel T cells were isolated from splenocytes of 6-8 week old pmel-1 mice [B6.Cg-Thy1^{a}/CyTg(TcraTcrb)8Rest/J] via a negative T cell isolation kit (StemCell). The lymph node homogenate was cultured with the naïve pmel T cells at a 1:1 ratio overnight for 24 hours to activate the T cells.

[0368] On day 1 after the co-culture was started, pmel T cells were counted and characterized by flow cytometry on a Cytoflex S flow cytometer (Beckman Coulter) after staining with murine anti-CD3, anti-CD4, anti-CD8, anti-Thy1.1, anti-CD25, and anti-CD69 antibodies. Additionally, the cytolytic capacity of the pmel T cells post co-culture was assessed through a 24 hour luciferase killing assay (FIG. 26A). 5×10⁴ B16F10 tumor cells expressing firefly luciferase were cocultured with adoptively transferred T cells at various effector-to-target ratios in triplicates in black-walled 96-well plates in a total volume of 200 μL of cell media. Target cells alone were plated at the same cell density to determine the maximal luciferase expression as a reference (max signal). 24 hours later, the supernatant fluid was collected and analyzed for T cell cytokine production using a Th17 murine cytokine kit on a Luminex LX200 analyzer (Millipore) and then One-Glo reagent (Promega) was added to each well, see FIG. 26B. Emitted luminescence of each sample (sample signal) was detected by a Synergy H1 Hybrid plate reader (BioTek). Percent lysis was determined as [1−(sample signal/max signal)]×100.

[0369] On day 6 after the co-culture was started, pmel T cells were counted and characterized by flow cytometry on a Cytoflex S flow cytometer (Beckman Coulter) after staining with murine anti-CD3, anti-CD4, anti-CD8, anti-Thy1.1, anti-CD25, and anti-CD69 antibodies. Additionally, the cytolytic capacity of the pmel T cells post co-culture was assessed through a 24 hour luciferase killing assay (FIG. 27A). 5×10⁴ B16F10 tumor cells expressing firefly luciferase were cocultured with adoptively transferred T cells at various effector-to-target ratios in triplicates in black-walled 96-well plates in a total volume of 200 μL of cell media. Target cells alone were plated at the same cell density to determine the maximal luciferase expression as a reference (max signal). 24 hours later, the supernatant fluid was collected and analyzed for T cell cytokine production using a Th17 murine cytokine kit on a Luminex LX200 analyzer (Millipore) and then One-Glo reagent (Promega) was added to each well, see FIG. 27B. Emitted luminescence of each sample (sample signal) was detected by a Synergy H1 Hybrid plate reader (BioTek). Percent lysis was determined as [1−(sample signal/max signal)]×100. These results indicate that boosting with amphiphilic vaccine in the lymph nodes enhances functionality of TCR-T cells.

### Example 4. Treatment of Large, Established Tumors with Amphiphile Boosting

[0370] 6-8 week old C57BL/6 mice were inoculated subcutaneously with 5×10⁵ B16F10 melanoma tumor cells on day −10 to generate larger, established tumors. On day −1, tumors were measured with calipers and mice with equal tumor burden were selected for treatment. Mice were then randomized into different treatment cohorts. On day −1, mice were treated subcutaneously via tail base with PBS, soluble vaccine including 10 μg of soluble gp100 peptide, or amphiphile vaccine including 10 μg of amphiphilic gp100 peptide and 1 nmol amphiphilic CpG. This was followed by tail vein intravenous injection of 1×10⁶ mCherry transduced pmel T cells. A subsequent booster dose of vaccine was given on day 3 via subcutaneous tail base injection. Tumor volume, overall survival, and mouse weight were recorded as shown in FIGS. 29A, 29B, and 29C respectively. These results show that boosting with amphiphilic vaccine I combination with preconditioning potently enhances TCR-T therapy to delay growth of large established solid tumors. Mice were euthanized when tumor growth led to a volume greater than 1,000 mm³ by V=(0.5ab² where a is the longest length and b is the shortest length. The investigator was blinded when assessing the outcome. On days 5 and 19 post T cell infusion, whole blood was collected from mice via retro-orbital bleed. Red blood cells were lysed and T cells were washed with PBS and used for subsequent flow cytometry analysis. Adoptively transferred pmel T cells were identified by staining with murine anti-CD3, anti-CD4, anti-CD8, and anti-Thy1.1 antibodies and running on a Cytoflex S Flow Cytometer (Beckman Coulter) (FIG. 28). These results show that amphiphilic vaccination expands tumor specific TCR T cells in large, established tumor bearing hosts.

[0371] pmel-1 mice [B6.Cg-Thy1^{a}/CyTg(TcraTcrb)8Rest/J] were euthanized and spleens were harvested. Following tissue dissociation and red blood cell lysis, T cells were isolated by negative bead selection and subsequently activated with CD3/CD28 Dynabeads at a bead:cell ratio of 1:2 (Invitrogen). Cells were expanded in vitro by culturing in RPMI1640 supplemented with 10% heat-inactivated FBS, sodium pyruvate, 1% penicillin/streptomycin, 2-mercaptoethanol, and 100 IU/mL of recombinant human IL2. 24 and 48 hours after initial expansion, T cells were spinoculated with viral supernatant collected from transfected Phoenix-ECO cells. Murine T cells were transduced by centrifugation on RetroNectin coated plates with retroviral supernatant from viral packaging cells.

### Example 5. Treatment of Large, Established Tumors with Amphiphile Boosting and Preconditioning

[0372] 6-8 week old C57BL/6 mice were inoculated subcutaneously with 5×10⁵ B16F10 melanoma tumor cells on day −10. After 8 days of tumor growth, on day −2, mice were subjected to 5 Gy whole body gamma irradiation. On day −1, tumors were measured with calipers and mice with equal tumor burden were selected for treatment. Mice were then randomized into different treatment cohorts. On day −1, mice were treated subcutaneously via tail base with PBS, soluble vaccine including 10 μg of soluble gp100 peptide, or amphiphile vaccine including 10 μg of amphiphilic gp100 peptide and 1 nmol amphiphilic CpG. This was followed by tail vein intravenous injection of 1×10⁵ or 1×10⁶ T cells freshly isolated from splenocytes of 6-8 week old pmel-1 mice [B6.Cg-Thy1^{a}/CyTg(TcraTcrb)8Rest/J] via a negative T cell isolation kit on day 0. A subsequent booster dose of either soluble of amphiphilic vaccine was given on day 3, via subcutaneous tail base injection. Tumor volume, mouse weight, and overall survival were recorded. Mice were euthanized when tumor growth led to a volume greater than 1,000 mm³ by V=(0.5ab² where a is the longest length and b is the shortest length. The investigator was blinded when assessing the outcome.

[0373] On day 5 post T cell infusion, whole blood was collected from mice via retro-orbital bleed. Red blood cells were lysed and T cells were washed with PBS and used for subsequent flow cytometry analysis. Adoptively transferred pmel T cells in peripheral blood were identified by staining with murine anti-CD3, anti-CD4, anti-CD8, and anti-Thy1.1 antibodies and running on a Cytoflex S Flow Cytometer (Beckman Coulter) (FIGS. 30 and 31). Tumor volume, overall survival, and mouse weight were recorded as shown in FIGS. 32A, 32B, and 32C respectively. Mice were euthanized when tumor growth led to a volume greater than 1,000 mm³ by V=(0.5ab² where a is the longest length and b is the shortest length. The investigator was blinded when assessing the outcome. These results show that amphiphilic vaccination expands tumor specific TCR T cells in lymphodepleted hosts and boosting with amphiphilic vaccine in combination with preconditioning potently enhances TCR-T therapy to delay the growth of large established solid tumors.

### Example 6. Amphiphilic Boosters Enhance TCR-T Therapy to Eliminate Established Solid Tumors

[0374] 6-8 week old C57BL/6 mice were inoculated subcutaneously with 5×10⁵ B16F10 melanoma tumor cells on day −10. On day −1, tumors were measured with calipers and mice with equal tumor burden were selected for treatment. Mice were then randomized into different treatment cohorts. On day −1, mice were treated subcutaneously via tail base with PBS, 10 μg soluble gp100, or 10 μg amphiphilic gp100. This was followed by a day 0 tail vein intravenous injection of 5×10⁶ T cells previously isolated from splenocytes of 6-8 week old pmel-1 mice [B6.Cg-Thy1^{a}/CyTg(TcraTcrb)8Rest/J] via a negative T cell isolation kit and retrovirally transduced with mCherry. Subsequent booster doses of vaccine were given two times a week for two weeks via subcutaneous tail base injection on days 3, 7, 10, and 14. Tumor volume and overall survival were recorded (FIGS. 33A-33B). Mice were euthanized when tumor growth led to a volume greater than 1,000 mm³ by V=(0.5ab² where a is the longest length and b is the shortest length.

### Example 7. Effect of AMP-Boosting on Providing Protection Against Secondary Tumor Rechallenge

[0375] Mice which had previously rejected tumor following adoptive T cell transfer and the amphiphilic gp100 and a tumor naïve control group were challenged with a second 5×10⁵ dose of B116F110 melanoma tumor cells on day 75 post initial adoptive transfer. No subsequent adoptive transfer or vaccination was performed. Peripheral blood was collected following tumor implantation to analyze for T cells present in circulating blood by flow cytometry (FIG. 34A). Tumor volume and overall survival were recorded (FIGS. 34B-34D). Mice were euthanized when tumor growth led to a volume greater than 1,000 mm³ by V=(0.5ab² where a is the longest length and b is the shortest length. The investigator was blinded when assessing the outcome.

[0376] The amphiphile antigen vaccination led to enhanced persistence of tumor specific TCR T cells and protection against secondary tumor challenge.

### Example 8. AMP-Boosting Expands TCR-T Cells in Blood and Lymph Nodes and Enhances Tumor Infiltration

[0377] 6-8 week old C57BL/6 mice were inoculated subcutaneously with 5×10⁵ B116F110 melanoma tumor cells on day −10. On day −1, tumors were measured with calipers and mice with equal tumor burden were selected for treatment. Mice were then randomized into different treatment cohorts. On day −1, mice were treated subcutaneously via tail base with PBS, 10 μg soluble gp100, or 10 μg amphiphilic gp100. This was followed by DO tail vein intravenous injection of 5×10⁶ T cells previously isolated from splenocytes of 6-8 week old pmel-1 mice [B6.Cg-Thy1^{a}/CyTg(TcraTcrb)8Rest/J] via a negative T cell isolation kit (StemCell) and retrovirally transduced with mCherry. A subsequent booster dose of vaccine was given on D3 via subcutaneous tail base injection. Peripheral blood was collected 5 days after T cell injection to analyze for T cells present in circulating blood (FIG. 35A). Mice were euthanized on D7 post adoptive T cell transfer and tumors and inguinal lymph nodes were harvested for analysis by flow cytometry for the amount of pmel T cells in the lymph node (FIG. 35B), the amount of pmel cells per mg of tumor (FIG. 35C), the amount of dendritic cells in the lymph nodes (FIG. 36A), the amount of CD40+ and MHCII+ dendritic cells (FIGS. 36B and 36C), and the number of dendritic cells with CD80 and/or CD86 (FIG. 36D). Harvested tumor cells were also analyzed through Intracellular Cytokine staining after overnight stimulation with tumor associated peptides as indicated (FIGS. 38A-38C and 40A-40C). In a separate experiment, mice were euthanized on D1 or D7 post adoptive T cell transfer and inguinal lymph nodes were harvested for RNA sequencing analysis by a 561 gene mouse immunology nanostring panel (Canopy Biosciences) (FIGS. 37 and 39).

### Example 9. Amphiphile Vs. Soluble Cognate Antigen Vaccination Ex Vivo

[0378] 6-8 week old C57BL/6 mice were vaccinated subcutaneously via tail base injection with either PBS, 10 μg soluble gp100, or 10 μg amphiphilic gp100. After 48 hours, the mice were euthanized and inguinal lymph nodes were extracted and mechanically dissociated and filtered through a 70 μm cell strainer to form a lymph node homogenate. The homogenate was spun down at 1,500 RPM for 5 minutes at 4° C. to pellet the cells.

[0379] Previously, murine T cells were isolated from splenocytes of 6-8 week old pmel-1 mice [B6.Cg-Thy1^{a}/CyTg(TcraTcrb)8Rest/J] via a negative T cell isolation kit and retrovirally transduced with mCherry and rested prior to Lymph node culture.

[0380] The lymph node homogenate was cultured with the previously activated, transduced, and rested pmel T cells at a 1:1 ratio overnight for 24 hours to activate the T cells.

[0381] On Days 1, 3, and 6 after the co-culture was started, pmel T cells were counted for proliferation analysis and characterized by flow cytometry on a Cytoflex S flow cytometer (Beckman Coulter) after staining with murine anti-CD3, anti-CD4, anti-CD8, anti-Thy1.1, anti-CD25, and anti-CD69 antibodies (FIG. 44). On Days 1 and 6 after co-culture, Supernatant liquid was collected from TCR T Cell: Lymph Node cultures and analyzed by Luminex for secretion of INFg murine cytokines. These figures are generated from triplicate wells from 2 independent experiments (FIGS. 43A and 43B).

[0382] After overnight culture with lymph node homogenate, activated pmel T cells were counted (FIG. 41) and cultured at various Effector to Target Ratios with B16F10 target cells expressing luciferase gene to determine specific lysis (FIG. 42). 5×10⁴ target cells expressing firefly luciferase were cocultured with adoptively transferred T cells at various effector-to-target ratios in triplicates in black-walled 96-well plates in a total volume of 200 μL of cell media. Target cells alone were plated at the same cell density to determine the maximal luciferase expression as a reference (max signal). 24 hours later, One-Glo reagent (Promega) was added to each well. Emitted luminescence of each sample (sample signal) was detected by a Synergy H1 Hybrid plate reader (BioTek). Percent lysis was determined as [1−(sample signal/max signal)]×100. These figures are generated from triplicate wells from 2 independent experiments.

[0383] Mice which had previously rejected tumor following adoptive T cell transfer and 10 μg amphiphilic gp100 vaccine and a tumor naïve control group were challenged with a second 5×10⁵ dose of B16F10 melanoma tumor cells on day 75 post initial adoptive transfer. One week prior, the adoptively transferred cells were depleted by intraperitoneal injection of an anti-thy1.1 antibody. This antibody was continued weekly for the duration of the experiment. No subsequent adoptive transfer or vaccination was performed, indicating that the anti-tumor effect demonstrated was related to the endogenous antigen spread effect. Peripheral blood was collected prior to depletion and following depletion, which showed successful reduction of adoptively transferred T cells (FIG. 49A). Tumor volume and overall survival were recorded (FIGS. 49B, 49C, and 49D). Mice were euthanized when tumor growth led to a volume greater than 1,000 mm³ by V=(0.5ab² where a is the longest length and b is the shortest length. The investigator was blinded when assessing the outcome.

### Example 10. Amphiphile Boosting of KRAS Specific TCR T Cells

[0384] Human peripheral blood mononuclear cells were isolated from an HLA A*11:01 or HLA C*08:02 donor leukopack (StemExpress). Monocytes and T cells were further isolated by a negative monocyte or T cell isolation (StemCell) kit, respectively. Following negative bead selection, human T cells were subsequently activated with CD3/CD28 Dynabeads at a bead:cell ratio of 1:1 (Invitrogen). Cells were expanded in vitro by culturing in RPMI1640 supplemented with 10% heat-inactivated FBS, sodium pyruvate, 1% penicillin/streptomycin, 2-mercaptoethanol, and 50 IU/mL of recombinant human IL-2. 24 and 48 hours after initial expansion, T cells were spinoculated with viral supernatant collected from Phoenix-Ampho cells transfected with the TCR 701 KRAS G12D specific TCR T Cell construct, a TCR 700 KRAS G12V specific TCR T Cell, or an mCherry control construct. Human T cells were transduced by centrifugation on RetroNectin coated plates with retroviral supernatant from viral packaging cells and then left to rest for 6 days before use. Transduction efficiency was calculated by flow cytometric staining with a murine TCR beta antibody or by analyzing mCherry levels for the control T cells on a Cytoflex S flow cytometer (Beckman Coulter). Monocytes were matured according to manufacturer's instructions (StemCell).

[0385] Five days after T cells were rested, mature human dendritic cells were labeled with PBS, soluble, or amp KRAS peptides overnight for 18 hours. The next day, the cells were washed and counted. Human T cells were characterized by flow cytometry on a Cytoflex S flow cytometer (Beckman Coulter) after staining with murine anti-TCR beta, human anti-CD3, anti-CD4, anti-CD8, anti-CD25, and anti-CD69 antibodies (FIG. 45 and FIG. 58). Human TCR T cells were cultured with autologous dendritic cells at a 2:1 T Cell: Dendritic Cell ratio overnight for 18 hours.

[0386] On Day 2 and Day 5 after the dendritic cells were labeled, human T cells were characterized by flow cytometry on a Cytoflex S flow cytometer (Beckman Coulter) after staining with murine anti-TCR beta, human anti-CD3, anti-CD4, anti-CD8, anti-CD25, and anti-CD69 antibodies (FIG. 45 and FIG. 59). The human T cells were also analyzed for the amount of IFNγ, IL-2, and TNFαγ that was present (FIGS. 46A-46C and FIGS. 60A-60C). These data were generated from 4 independent experiments with two different human PBMC donors.

[0387] The cell cultures transfected with the TCR 701 KRAS G12D specific TCR T Cell construct, were counted on days 1, 2, 5, and 8 post co-culture (FIG. 67) and were characterized by flow cytometry on a Cytoflex S flow cytometer (Beckman Coulter) after staining with murine anti-TCR beta, human anti-CD3, anti-CD4, anti-CD8, anti-CD25, and anti-CD69 antibodies to get the percentage of TCR T Cells in the culture. These figures are generated from 3 independent experiments with two different human PBMC donors. These results show that TCR 701 proliferation is specifically enhanced by G12D peptide labeling of autologous dendritic cells (DC).

[0388] Following co-culture, human T cells were isolated by a negative bead selection, characterized by flow cytometry, counted and infused into 10 day Panc-1 (HLA A11+, KRAS G12D+) tumor bearing NSG mice, which has been previously described, see, e.g., Takakura et al. PLoS One. 2015 Dec. 7; 10(12); Kim et al. Oncol Rep. 2013 September; 30(3):1129-36; and Yu et al. Mol Cancer Ther, 2009 Jan. 1; 8(1). Mice were bled on day 3 to assess T cell engraftment (FIG. 68) and then euthanized on day 35 and tumors analyzed for T cell persistence (FIGS. 69A and 69B). 35 days after infusion of the T cells, the mice were euthanized and tumors were mechanically dissociated and analyzed by flow cytometry on a Cytoflex S flow cytometer (Beckman Coulter) after staining with murine anti-TCR beta, human anti-CD3, anti-CD4, anti-CD8, anti-CD25, anti-CD69, anti-PD-1, anti-TIM-3, and anti-LAG-3 antibodies (FIGS. 70A and 70B). These results show that TCR 701 is specifically activated by G1 2D peptide labeling of autologous dendritic cells (DC) and enhances T cell persistence in the NSG tumor model.

[0389] After overnight culture with labeled autologous human dendritic cells, activated HLA A*11:01 TCR T cells were counted and cultured at various Effector to Target Ratios with either Cos-7 target cells expressing luciferase gene, HLA A*11:01, and the KRAS G12D mutation of the KRAS G12D mutation, or a Panc-1 human derived tumor line that also expresses a luciferase gene, HLA A*11:01, and the KRAS G12D mutation KRAS G12D mutation to determine specific lysis (FIGS. 47A, 47B, and 61). 5×10⁴ target cells expressing firefly luciferase were cocultured with adoptively transferred T cells at various effector-to-target ratios in triplicates in black-walled 96-well plates in a total volume of 200 μL of cell media. Target cells alone were plated at the same cell density to determine the maximal luciferase expression as a reference (max signal). 24 hours later, One-Glo reagent (Promega) was added to each well. Emitted luminescence of each sample (sample signal) was detected by a Synergy H1 Hybrid plate reader (BioTek). Percent lysis was determined as [1−(sample signal/max signal)]×100. These figures are generated from 4 independent experiments with two different human PBMC donors.

[0390] Four days after T cells were rested, Soluble or Amphiphile KRAS peptides were incubated overnight at 37 degrees Celsius in human serum to imitate in vivo conditions. Five days after T cells were rested, mature human dendritic cells were labeled with the overnight incubated soluble or amp KRAS peptides or freshly prepared soluble or AMP kras peptides overnight for 18 hours. The next day, the cells were washed and counted. Human T cells were characterized by flow cytometry on a Cytoflex S flow cytometer (Beckman Coulter) after staining with murine anti-TCR beta, human anti-CD3, anti-CD4, anti-CD8, anti-CD25, and anti-CD69 antibodies (FIG. 48D). Human TCR T cells were cultured with autologous DCs at a 2:1 T Cell: Dendritic Cell ratio overnight for 18 hours. Supernatant fluid was collected from TCR T Cell: Dendritic Cell cultures and analyzed by Luminex for secretion of IL-2 or INFg human cytokines (FIGS. 48A-48C). Additionally, the fold change in activation and tumor lysis were measured (FIGS. 48E, 62A, and 62B). These figures are generated from 2 independent experiments with two different human PBMC donors.

[0391] In another experiment, naïve, non-tumor-bearing 6-8 week old C57BL/6 HLA A1101 mice (Taconic) were randomized into different treatment cohorts. On day −1, mice were treated subcutaneously via tail base with PBS, soluble, or amphiphile KRAS peptide vaccine. This was followed by a tail vein intravenous injection of 3×10⁶ T cells previously isolated from splenocytes of 6-8 week old C57BL/6 HLA A1101 mice (Taconic) via a negative T cell isolation kit (StemCell) and retrovirally transduced with either a G12D KRAS specific TCR construct (TCR6) or a G12V KRAS specific TCR construct (TCR3) on day 0. Both constructs also contained mCherry so that transduction efficiency could be calculated and the KRAS specific TCR T cells could be identified in vivo. A subsequent booster dose of vaccine was given on days 3, 7, 10 and 14 via subcutaneous tail base injection. Peripheral blood was collected 15 days after T cell injection to analyze for T cells present in circulating blood by flow cytometry. The number of mCherry+ T cells that were CD3+ were measured (FIG. 50A) as well as the number of mCherry+CD3+ T cells that were CD25+, CD69+, or CD25+ and CD69+(FIG. 50B). On day 15, the data showed that amphiphilic vaccination led to greater number of KRAS specific TCR-T Cells in peripheral blood as determined by the number of mCherry+ T cells. Additionally, they were more activated from the amphiphile vaccination combination.

[0392] Mice were euthanized on day 15 post adoptive T cell transfer for analysis of spleens, lymph nodes, and lungs. Spleen tissue was processed and stimulated with KRAS mutant peptides in an ELISPOT assay overnight to determine the KRAS Specific T cell response within the spleen of the respective T cell groups (FIGS. 51A and 51B). On day 15, the amphiphile vaccination showed a greater number of KRAS specific TCR-T Cells in spleen as determined by the number of spot forming cells in an ELISPOT assay.

[0393] Lymph node tissue was processed and cells were counted followed by flow cytometry analysis to determine the number of dendritic cells present in the lymph nodes (FIG. 52). On day 15, the amphiphilic vaccine led to a greater number of dendritic cells in the lymph nodes. The tissue from the lymph nodes was also analyzed for the number of MHCII+ dendritic cells, CD40+ dendritic cells, and CD80+, CD86+, or CD86+ and CD80+ dendritic cells (FIGS. 53A-53C). On day 15, the amphiphilic vaccine led to a greater number of dendritic cells as well as a greater number of activated dendritic cells in the lymph nodes. Additionally, the lymph node tissue was analyzed for the number of mCherry+ and CD3+ T cells (FIG. 54A), and the number of mCherry+CD3+ T cells that were CD25+, CD69+, or CD25+ and CD69+(FIG. 54B). On day 15, the amphiphile vaccine and subsequent dendritic cell activation and licensing led to a greater number of KRAS specific TCR-T Cells in lymph nodes as determined by the number of mCherry+ T cells in lymph nodes of treated mice.

[0394] Lung tissue was processed and cells were counted followed by flow cytometry analysis to determine the number of dendritic cells present in the lungs of treated mice (FIG. 55). The tissue from the lungs was also analyzed for the number of MHCII+ dendritic cells, CD40+ dendritic cells, and CD80+, CD86+, or CD86+ and CD80+ dendritic cells (FIGS. 56A-56C). On day 15, the amphiphilic vaccine led to a greater number of dendritic cells as well as a greater number of activated dendritic cells in the lungs. Additionally, the lung tissue was analyzed for the number of mCherry+ and CD3+ T cells (FIG. 57), On day 15, the amphiphile vaccine and subsequent dendritic cell activation and licensing led to a greater number of KRAS specific TCR-T Cells in lungs as determined by the number of mCherry+ T cells in lungs of treated mice.

[0395] A separate cohort of C57BL/6 HLA A1101 mice were euthanized on day 14 and the splenocytes were harvested. The splenocytes were split into two groups. One group was pulsed with a G12V peptide and one was not. Both groups were then labeled with varying concentrations of fluorescent carboxyfluorescein succinimidyl ester (CFSE), washed 3 time, combined at a 1:1 ratio, and injected into the treatment cohort of mice. Mice were then euthanized on day 15 post adoptive T cell transfer, 1 day after the labeled splenocyte infusion, and the spleens were analyzed for the presence of the CFSE to determine the specific lysis of the KRAS G12V labeled splenocytes in an in vivo killing assay (FIG. 66). Enhanced in vivo killing was observed for splenocytes pulsed with G12V in groups given a TCR-T and AMP-G12V vaccination regimen.

### Example 11. Amphiphilic Boosting of E7 Specific TCR T Cells

[0396] Human peripheral blood mononuclear cells were isolated from an HLA A*02:01 donor leukopack (StemExpress). Monocytes and T cells were further isolated by a negative monocyte or T cell isolation (StemCell) kit, respectively. Following negative bead selection, human T cells were subsequently activated with CD3/CD28 Dynabeads at a bead:cell ratio of 1:1 (Invitrogen). Cells were expanded in vitro by culturing in RPMI1640 supplemented with 10% heat-inactivated FBS, sodium pyruvate, 1% penicillin/streptomycin, 2-mercaptoethanol, and 50 IU/mL of recombinant human IL-2. 24 and 48 hours after initial expansion, T cells were spinoculated with viral supernatant collected from Phoenix-Ampho cells transfected with the 1 G4, E7 specific TCR T Cell construct or an mCherry control construct. Human T cells were transduced by centrifugation on RetroNectin coated plates with retroviral supernatant from viral packaging cells and then left to rest for 6 days before use. Transduction efficiency was calculated by flow cytometric staining with a murine TCR beta antibody or by analyzing mCherry levels for the control T cells on a Cytoflex S flow cytometer (Beckman Coulter). Monocytes were matured according to manufacturer's instructions (StemCell).

[0397] Five days after T cells were rested, mature human dendritic cells were labeled with PBS, soluble, or amp E7 peptides overnight for 18 hours. The next day, the cells were washed and counted. Human T cells were characterized by flow cytometry on a Cytoflex S flow cytometer (Beckman Coulter) after staining with murine anti-TCR beta, human anti-CD3, anti-CD4, anti-CD8, anti-CD25, and anti-CD69 antibodies. Human TCR T cells were cultured with autologous DCs at a 2:1 T Cell: Dendritic Cell ratio overnight for 18 hours.

[0398] The cell cultures were counted on days 1, 2, 5, and 8 post co-culture (FIG. 77) and were characterized by flow cytometry on a Cytoflex S flow cytometer (Beckman Coulter) after staining with murine anti-TCR beta, human anti-CD3, anti-CD4, anti-CD8, anti-CD25, and anti-CD69 antibodies to get the percentage of TCR T Cells in the culture. E7 specific TCT-T cells are specifically activated by amp-E7 peptide labeling of autologous dendritic cells to enhance specific tumor lysis.

[0399] On Day 2 and D5 after the DCs were labeled, human T cells were characterized by flow cytometry on a Cytoflex S flow cytometer (Beckman Coulter) after staining with murine anti-TCR beta, human anti-CD3, anti-CD4, anti-CD8, anti-CD25, and anti-CD69 antibodies (FIG. 63). These figures are generated from 4 independent experiments with two different human PBMC donors.

[0400] On Day 2 after the DCs were labeled, Supernatant liquid was collected from TCR T Cell: Dendritic Cell cultures and analyzed by Luminex for secretion of IL-2, TNFα or INFγ human cytokines (FIGS. 64A and 64B). These figures are generated from 4 independent experiments with two different human PBMC donors.

[0401] After overnight culture with labeled autologous human DCs, activated HLA A*02:01 TCR T cells were counted and cultured at various Effector to Target Ratios with a Ca Ski human derived tumor line that also expresses a luciferase gene, HLA A*02:01, and the HPV16 E7 epitope to determine specific lysis (FIG. 65). 5×10⁴ target cells expressing firefly luciferase were cocultured with adoptively transferred T cells at various effector-to-target ratios in triplicates in black-walled 96-well plates in a total volume of 200 μL of cell media. Target cells alone were plated at the same cell density to determine the maximal luciferase expression as a reference (max signal). 24 hours later, One-Glo reagent (Promega) was added to each well. Emitted luminescence of each sample (sample signal) was detected by a Synergy H1 Hybrid plate reader (BioTek). Percent lysis was determined as [1−(sample signal/max signal)]×100. These figures are generated from 4 independent experiments with three different human PBMC donors.

### Example 12. Amphiphile Boosting of NY-ESO-1 Specific TCR T Cells

[0402] Human peripheral blood mononuclear cells were isolated from an HLA A*02:01 donor leukopack (StemExpress). Monocytes and T cells were further isolated by a negative monocyte or T cell isolation (StemCell) kit, respectively. Following negative bead selection, human T cells were subsequently activated with CD3/CD28 Dynabeads at a bead:cell ratio of 1:1 (Invitrogen). Cells were expanded in vitro by culturing in RPMI1640 supplemented with 10% heat-inactivated FBS, sodium pyruvate, 1% penicillin/streptomycin, 2-mercaptoethanol, and 50 IU/mL of recombinant human IL-2. 24 and 48 hours after initial expansion, T cells were spinoculated with viral supernatant collected from Phoenix-Ampho cells transfected with the 1 G4 TCR, NY-ESO-1 specific TCR T Cell construct or an mCherry or MART-1 targeted DMF5 TCR T control construct. Human T cells were transduced by centrifugation on RetroNectin coated plates with retroviral supernatant from viral packaging cells and then left to rest for 6 days before use. Transduction efficiency was calculated by flow cytometric staining with a murine TCR beta antibody or by analyzing mCherry levels on a Cytoflex S flow cytometer (Beckman Coulter). Monocytes were matured according to manufacturer's instructions (StemCell).

[0403] Five days after T cells were rested, mature human dendritic cells were labeled with PBS, soluble, or amp NY-ESO-1 peptides overnight for 18 hours. The next day, the cells were washed and counted. Human T cells were characterized by flow cytometry on a Cytoflex S flow cytometer (Beckman Coulter) after staining with murine anti-TCR beta, human anti-CD3, anti-CD4, anti-CD8, anti-CD25, and anti-CD69 antibodies. Human TCR T cells were cultured with autologous DCs at a 2:1 T Cell: Dendritic Cell ratio overnight for 18 hours.

[0404] On Day 2 after the dendritic cells were labeled, human T cells were characterized by flow cytometry on a Cytoflex S flow cytometer (Beckman Coulter) after staining with murine anti-TCR beta, human anti-CD3, anti-CD4, anti-CD8, anti-CD25, and anti-CD69 antibodies (FIG. 71). These figures are generated from 2 independent experiments with two different human PBMC donors. These results support that 1 G4 specifically activated NY-ESO-1 AMP-peptide labeling of autologous dendritic cells.

[0405] On Days 2 and 8 after the dendritic cells were labeled, supernatant liquid was collected from TCR T Cell: Dendritic Cell cultures and analyzed by Luminex for secretion of IL-2, TNFα, GM-CSF or INFγ human cytokines (FIGS. 72A-72D and FIGS. 73A-73D). These results support that 1 G4 is specifically activated by NY-ESO-1 AMP-peptide labeling of autologous dendritic cells.

[0406] After overnight culture with labeled autologous human dendritic cells, activated HLA A*02:01 NY-ESO-1 specific 1 G4 TCR T cells were counted and cultured at various Effector to Target Ratios with an A375 human derived tumor line that also expresses a luciferase gene, HLA A*02:01, and the NY-ESO-1 tumor associated antigen to determine specific lysis. 5×10⁴ target cells expressing firefly luciferase were co-cultured with adoptively transferred T cells at various effector-to-target ratios in triplicates in black-walled 96-well plates in a total volume of 200 μL of cell media. Target cells alone were plated at the same cell density to determine the maximal luciferase expression as a reference (max signal). 24 hours later, One-Glo reagent (Promega) was added to each well. E mitted luminescence of each sample (sample signal) was detected by a Synergy H1 Hybrid plate reader (BioTek). Percent lysis was determined as [1−(sample signal/max signal)]×100 on day 3 (FIG. 74). These results support that 1 G4 is specifically activated by NY-ESO-1 AMP-peptide labeling of autologous dendritic cells.

[0407] The cell cultures were counted on days 1, 2, 5, and 8 post co-culture (FIG. 75) and were characterized by flow cytometry on a Cytoflex S flow cytometer (Beckman Coulter) after staining with murine anti-TCR beta, human anti-CD3, anti-CD4, anti-CD8, anti-CD25, and anti-CD69 antibodies to get the percentage of TCR T Cells in the culture. These results show that 1 G4 TCR T cell proliferation is specifically enhanced by AMP-NY-ESO-1 peptide labeling of autologous dendritic cells.

[0408] Four days after T cells were rested, soluble or amphiphile NY-ESO-1 peptides were incubated overnight at 37 degrees Celsius in human serum to imitate in vivo conditions. Five days after T cells were rested, mature human dendritic cells were labeled with the overnight incubated soluble or AMP NY-ESO-1 peptides or freshly prepared soluble or AMP NY-ESO-1 peptides overnight for 18 hours. The next day, the cells were washed and counted. Human T cells were characterized by flow cytometry on a Cytoflex S flow cytometer (Beckman Coulter) after staining with murine anti-TCR beta, human anti-CD3, anti-CD4, anti-CD8, anti-CD25, and anti-CD69 antibodies. Human TCR T cells were cultured with autologous dendritic cells at a 2:1 T Cell: Dendritic Cell ratio overnight for 18 hours. Activation was assayed by CD25 and CD69 (FIG. 76A). Expression and tumor lysis was determined by overnight 24 hour cytotoxicity assays as previously described (FIG. 76B). These results support that AMP peptides maintain stability and boost NY-ESO-1 specific TCT T cells in mock in vivo conditions. These figures were generated from 2 independent experiments with two different human PBMC donors.

### NUMBERED EMBODIMENTS

[0409] 1. A method of stimulating an immune response to a target cell population or target tissue in a subject, the method comprising administering to the subject (1) an amphiphilic ligand conjugate comprising a lipid, a peptide, and, optionally, a linker, and (2) a T-cell receptor (TCR) modified immune cell, wherein the TCR binds the peptide of the amphiphilic ligand conjugate.

[0410] 2. A method of stimulating an immune response to a target cell population or target tissue in a subject, the method comprising administering to the subject (1) an amphiphilic ligand conjugate comprising a lipid, a ligand for a mucosal-associated invariant T-cell (MAIT), and, optionally, a linker, and (2) a T-cell receptor (TCR) modified immune cell, wherein the TCR binds the ligand of the amphiphilic ligand conjugate.

[0411] 3. The method of embodiment 1 or 2, further comprising administering an adjuvant to the subject.

[0412] 4. The method of any one of embodiments 1-3, wherein the lipid of the amphiphilic ligand conjugate inserts into a cell membrane under physiological conditions, binds albumin under physiological conditions, or both.

[0413] 5. The method of any one of embodiments 1-4, wherein the lipid of the amphiphilic ligand conjugate is a diacyl lipid.

[0414] 6. The method of embodiment 5, wherein the diacyl lipid of the amphiphilic ligand conjugate comprises acyl chains comprising 12-30 hydrocarbon units, 14-25 hydrocarbon units, 16-20 hydrocarbon units, or 12, 13, 14, 15, 16, 17, 18, 19, 20, 21, 22, 23, 24, 25, 26, 27, 28, 29, or 30 hydrocarbon units.

[0415] 7. The method of embodiment 6, wherein the lipid is 1,2-distearoyl-sn-glycero-3-phosphoethanolamine (DSPE).

[0416] 8. The method of any one of embodiments 1-7, wherein the linker is selected from the group consisting of a hydrophilic polymer, a string of hydrophilic amino acids, a polysaccharide, and an oligonucleotide, or a combination thereof.

[0417] 9. The method of embodiment 8, wherein the linker comprises “N” polyethylene glycol units, wherein N is between 24-50.

[0418] 10. The method of embodiment 9, wherein the linker comprises PEG24-amido-PEG24.

[0419] 11. The method of any one of embodiments 1 and 3-10, wherein the peptide is an antigen, or a fragment thereof.

[0420] 12. The method of embodiment 11, wherein the antigen, or fragment thereof, is a tumor-associated antigen, or a fragment thereof.

[0421] 13. The method of embodiment 11 or embodiment 12, wherein the antigen, or fragment thereof, comprises between 3 amino acids and 50 amino acids.

[0422] 14. The method of embodiment 13, wherein the antigen comprises a fragment of the sequence of any one of SEQ ID NOs: 1-97 or 1125-1183, or comprises Ganglioside G2 or Ganglioside G3.

[0423] 15. The method of any one of embodiments 1-14, wherein the peptide comprises an amino acid sequence of any one of SEQ ID NOs: 98-1123.

[0424] 16. The method of embodiment 2, wherein the ligand for a MAIT cell is a small molecule metabolite ligand.

[0425] 17. The method of embodiment 2, wherein the ligand for a MAIT cell is a valine-citrulline-p-aminobenzyl carbamate modified ligand.

[0426] 18. The method of embodiment 17, wherein the valine-citrulline-p-aminobenzyl carbamate modified ligand is a valine-citrulline-p-aminobenzyl carbamate modified 5-amino-6-D-ribityl prodrug.

[0427] 19. The method of embodiment 2, wherein the ligand for a MAIT cell is a riboflavin metabolite or a drug metabolite.

[0428] 20. The method of embodiment 19, wherein the riboflavin metabolite is 5-(2-oxopropylideneamino)-6-d-ribitylaminouracil, 5-(2-oxoethylideneamino)-6-D-ribitylaminouracil, 6,7-dimethyl-8-D-ribityllumazine, 7-hydroxy-6-methyl-8-D-ribityllumazine, 6-hydroxymethyl-8-D-ribityl-lumazine, 6-(1H-indol-3-yl)-7-hydroxy-8-ribityllumazine, or 6-(2-carboxyethyl)-7-hydroxy8-ribityllumazine.

[0429] 21. The method of embodiment 19, wherein the drug metabolite is benzbromarone, chloroxine, diclofenac, 5-hydroxy diclofenac, 4-hydroxy diclofenac, floxuridine, galangin, menadione sodium bisulfate, mercaptopurine, or tetrahydroxy-1,4-quinone hydrate.

[0430] 22. The method of any one of embodiments 1-21, wherein the amphiphilic ligand conjugate is trafficked to a lymph node.

[0431] 23. The method of embodiment 22 wherein the amphiphilic ligand conjugate is trafficked to an inguinal lymph node or an axillary lymph node.

[0432] 24. The method of embodiment 22 or embodiment 23, wherein the amphiphilic ligand conjugate is retained in the lymph node for at least 4 days, at least 5 days, at least 6 days, at least 7 days, at least 8 days, at least 9 days, at least 10 days, at least 11 days, at least 12 days, at least 13 days, at least 14 days, at least 15 days, at least 16 days, at least 17 days, at least 18 days, at least 19 days, at least 20 days, at least 21 days, at least 22 days, at least 23 days, at least 24 days, or at least 25 days.

[0433] 25. The method of any one of embodiments 1-24, wherein the immune cell is a T cell, a B cell, a natural killer (NK) cell, a macrophage, a neutrophil, a dendritic cell, a mast cell, an eosinophil, or a basophil.

[0434] 26. The method of embodiment 25, wherein the immune cell is a T cell.

[0435] 27. The method of embodiment 2, wherein the immune cell is a human mucosal-associated T cell.

[0436] 28. The method of any one of embodiments 1-27, wherein the immune response is an anti-tumor immune response.

[0437] 29. The method of any one of embodiments 1-28, wherein the target cell population or the target tissue is a tumor cell population or a tumor tissue.

[0438] 30. The method of any one of embodiments 1-29, wherein the method comprises reducing or decreasing the size of the tumor tissue or inhibiting growth of the tumor cell population or the tumor tissue in the subject.

[0439] 31. The method of any one of embodiments 1-30, wherein the method comprises activating the immune cell, expanding the immune cell, and/or increasing proliferation of the immune cell, wherein the activating, expanding, and/or increasing proliferation is performed ex vivo or in vivo.

[0440] 32. The method of any one of embodiments 1-31, wherein the subject has a disease, a disorder, or a condition associated with expression or elevated expression of the antigen.

[0441] 33. The method of any one of embodiment 1-32, wherein the subject is lymphodepleted prior to the administration of the amphiphilic ligand conjugate and TCR modified immune cell.

[0442] 34. The method of embodiment 33, wherein the lymphodepletion is by sublethal irradiation.

[0443] 35. The method of any one of embodiments 1-34, wherein the subject is administered the amphiphilic ligand conjugate prior to receiving the immune cell comprising the TCR.

[0444] 36. The method of any one of embodiments 1-34, wherein the subject is administered the amphiphilic ligand conjugate after receiving the immune cell comprising the TCR.

[0445] 37. The method of any one of embodiments 1-34, wherein the amphiphilic ligand conjugate and the immune cell comprising the TCR are administered simultaneously.

[0446] 38. The method of any one of embodiments 1-37, wherein the amphiphilic ligand conjugate and/or the TCR modified immune cell are administered in a composition comprising a pharmaceutically acceptable carrier.

[0447] 39. The method of embodiment 38, wherein the composition further comprises an adjuvant.

[0448] 40. The method of embodiment 3 or 39, wherein the adjuvant is an amphiphilic oligonucleotide conjugate comprising an immunostimulatory oligonucleotide conjugated to a lipid, with or without a linker.

[0449] 41. A method of activating, proliferating, phenotypically maturing, or inducing acquisition of cytotoxic function of a TCR modified T-cell in vitro, comprising culturing the TCR modified T-cell in the presence of a dendritic cell comprising an amphiphilic ligand conjugate comprising a lipid, a peptide, and, optionally, a linker.

[0450] 42. A method of activating, proliferating, phenotypically maturing, or inducing acquisition of cytotoxic function of a TCR modified T-cell in vitro, comprising culturing the TCR modified T-cell in the presence of a dendritic cell comprising an amphiphilic ligand conjugate comprising a lipid, a small metabolite ligand, and, optionally, a linker.

[0451] 43. The method of embodiment 41 or embodiment 42, wherein the lipid of the amphiphilic ligand conjugate is a diacyl lipid.

[0452] 44. Use of (1) an amphiphilic ligand conjugate comprising a lipid, a peptide, and, optionally, a linker, and (2) a T-cell receptor (TCR) modified immune cell in a method of stimulating an immune response to a target cell population or target tissue in a subject, the method comprising administering to the subject (1) an amphiphilic ligand conjugate comprising a lipid, a peptide, and, optionally, a linker, and (2) a T-cell receptor (TCR) modified immune cell, wherein the TCR binds the peptide of the amphiphilic ligand conjugate.

[0453] 45. Use of (1) an amphiphilic ligand conjugate comprising a lipid, a ligand for a mucosal-associated invariant T-cell (MAIT), and, optionally, a linker, and (2) a T-cell receptor (TCR) modified immune cell in a method of stimulating an immune response to a target cell population or target tissue in a subject, the method comprising administering to the subject (1) an amphiphilic ligand conjugate comprising a lipid, a ligand for a mucosal-associated invariant T-cell (MAIT), and, optionally, a linker, and (2) a T-cell receptor (TCR) modified immune cell, wherein the TCR binds the ligand of the amphiphilic ligand conjugate.

[0454] 46. The method of embodiment 11, wherein the fragment is an immunogenic fragment.

### Other Embodiments

[0455] Although the foregoing invention has been described in some detail by way of illustration and example for purposes of clarity of understanding, the descriptions and examples should not be construed as limiting the scope of the invention. The disclosures of all patent and scientific literature cited herein are expressly incorporated in their entirety by reference.

What is claimed is:

1. A method of stimulating an immune response to a target cell population or target tissue in a subject, the method comprising administering to the subject (1) an amphiphilic ligand conjugate comprising a lipid, a peptide, and, optionally, a linker, and (2) a T-cell receptor (TCR) modified immune cell, wherein the TCR binds the peptide of the amphiphilic ligand conjugate.

2. A method of stimulating an immune response to a target cell population or target tissue in a subject, the method comprising administering to the subject (1) an amphiphilic ligand conjugate comprising a lipid, a ligand for a mucosal-associated invariant T-cell (MAIT), and, optionally, a linker, and (2) a T-cell receptor (TCR) modified immune cell, wherein the TCR binds the ligand of the amphiphilic ligand conjugate.

3. The method of claim 1 or 2, further comprising administering an adjuvant to the subject.

4. The method of claim 1 or 2, wherein the lipid of the amphiphilic ligand conjugate inserts into a cell membrane under physiological conditions, binds albumin under physiological conditions, or both.

5. The method of claim 1 or 2, wherein the lipid of the amphiphilic ligand conjugate is a diacyl lipid.

6. The method of claim 5, wherein the diacyl lipid of the amphiphilic ligand conjugate comprises acyl chains comprising 12-30 hydrocarbon units, 14-25 hydrocarbon units, 16-20 hydrocarbon units, or 12, 13, 14, 15, 16, 17, 18, 19, 20, 21, 22, 23, 24, 25, 26, 27, 28, 29, or 30 hydrocarbon units.

7. The method of claim 6, wherein the lipid is 1,2-distearoyl-sn-glycero-3-phosphoethanolamine (DSPE).

8. The method of claim 1 or 2, wherein the linker is selected from the group consisting of a hydrophilic polymer, a string of hydrophilic amino acids, a polysaccharide, and an oligonucleotide, or a combination thereof.

9. The method of claim 8, wherein the linker comprises “N” polyethylene glycol units, wherein N is between 24-50.

10. The method of claim 9, wherein the linker comprises PEG24-amido-PEG24.

11. The method of claim 1 or 2, wherein the peptide is an antigen, or a fragment thereof.

12. The method of claim 11, wherein the antigen, or fragment thereof, is a tumor-associated antigen, or a fragment thereof.

13. The method of claim 11, wherein the antigen, or fragment thereof, comprises between 3 amino acids and 50 amino acids.

14. The method of claim 13, wherein the antigen comprises a fragment of the sequence of any one of SEQ ID NOs: 1-97 or 1125-1183, or comprises Ganglioside G2 or Ganglioside G3.

15. The method of claim 1, wherein the peptide comprises an amino acid sequence of any one of SEQ ID NOs: 98-1123.

16. The method of claim 2, wherein the ligand for a MAIT cell is a small molecule metabolite ligand.

17. The method of claim 2, wherein the ligand for a MAIT cell is a valine-citrulline-p-aminobenzyl carbamate modified ligand.

18. The method of claim 17, wherein the valine-citrulline-p-aminobenzyl carbamate modified ligand is a valine-citrulline-p-aminobenzyl carbamate modified 5-amino-6-D-ribityl prodrug.

19. The method of claim 2, wherein the ligand for a MAIT cell is a riboflavin metabolite or a drug metabolite.

20. The method of claim 19, wherein the riboflavin metabolite is 5-(2-oxopropylideneamino)-6-d-ribitylaminouracil, 5-(2-oxoethylideneamino)-6-D-ribitylaminouracil, 6,7-dimethyl-8-D-ribityllumazine, 7-hydroxy-6-methyl-8-D-ribityllumazine, 6-hydroxymethyl-8-D-ribityl-lumazine, 6-(1H-indol-3-yl)-7-hydroxy-8-ribityllumazine, or 6-(2-carboxyethyl)-7-hydroxy8-ribityllumazine.

21. The method of claim 19, wherein the drug metabolite is benzbromarone, chloroxine, diclofenac, 5-hydroxy diclofenac, 4-hydroxy diclofenac, floxuridine, galangin, menadione sodium bisulfate, mercaptopurine, or tetrahydroxy-1,4-quinone hydrate.

22. The method of claim 1 or 2, wherein the amphiphilic ligand conjugate is trafficked to a lymph node.

23. The method of claim 22 wherein the amphiphilic ligand conjugate is trafficked to an inguinal lymph node or an axillary lymph node.

24. The method of claim 22, wherein the amphiphilic ligand conjugate is retained in the lymph node for at least 4 days, at least 5 days, at least 6 days, at least 7 days, at least 8 days, at least 9 days, at least 10 days, at least 11 days, at least 12 days, at least 13 days, at least 14 days, at least 15 days, at least 16 days, at least 17 days, at least 18 days, at least 19 days, at least 20 days, at least 21 days, at least 22 days, at least 23 days, at least 24 days, or at least 25 days.

25. The method of claim 1 or 2, wherein the immune cell is a T cell, a B cell, a natural killer (NK) cell, a macrophage, a neutrophil, a dendritic cell, a mast cell, an eosinophil, or a basophil.

26. The method of claim 25, wherein the immune cell is a T cell.

27. The method of claim 2, wherein the immune cell is a human mucosal-associated T cell.

28. The method of claim 1, wherein the immune response is an anti-tumor immune response.

29. The method of claim 1 or 2, wherein the target cell population or the target tissue is a tumor cell population or a tumor tissue.

30. The method of claim 1 or 2, wherein the method comprises reducing or decreasing the size of the tumor tissue or inhibiting growth of the tumor cell population or the tumor tissue in the subject.

31. The method of claim 1 or 2, wherein the method comprises activating the immune cell, expanding the immune cell, and/or increasing proliferation of the immune cell.

32. The method of claim 1 or 2, wherein the subject has a disease, a disorder, or a condition associated with expression or elevated expression of the antigen.

33. The method of claim 1 or 2, wherein the subject is lymphodepleted prior to the administration of the amphiphilic ligand conjugate and TCR modified immune cell.

34. The method of claim 33, wherein the lymphodepletion is by sublethal irradiation.

35. The method of claim 1 or 2, wherein the subject is administered the amphiphilic ligand conjugate prior to receiving the immune cell comprising the TCR.

36. The method of claim 1 or 2, wherein the subject is administered the amphiphilic ligand conjugate after receiving the immune cell comprising the TCR.

37. The method of claim 1 or 2, wherein the amphiphilic ligand conjugate and the immune cell comprising the TCR are administered simultaneously.

38. The method of claim 1 or 2, wherein the amphiphilic ligand conjugate and/or the TCR modified immune cell are administered in a composition comprising a pharmaceutically acceptable carrier.

39. The method of claim 38, wherein the composition further comprises an adjuvant.

40. The method of claim 3, wherein the adjuvant is an amphiphilic oligonucleotide conjugate comprising an immunostimulatory oligonucleotide conjugated to a lipid, with or without a linker.

41. A method of activating, proliferating, phenotypically maturing, or inducing acquisition of cytotoxic function of a TCR modified T-cell in vitro, comprising culturing the TCR modified T-cell in the presence of a dendritic cell comprising an amphiphilic ligand conjugate comprising a lipid, a peptide, and, optionally, a linker.

42. A method of activating, proliferating, phenotypically maturing, or inducing acquisition of cytotoxic function of a TCR modified T-cell in vitro, comprising culturing the TCR modified T-cell in the presence of a dendritic cell comprising an amphiphilic ligand conjugate comprising a lipid, a small metabolite ligand, and, optionally, a linker.

43. The method of claim 41, wherein the lipid of the amphiphilic ligand conjugate is a diacyl lipid.

44. The method of claim 42, wherein the lipid of the amphiphilic ligand conjugate is a diacyl lipid.

The application's sequence listing, which the Patent Office published only in electronic form, follows.

SEQUENCE LISTING (1183 sequences)

SEQ ID NO: 1 - protein, 252 aa, Influenza A virus
MSLLTEVETYVLSIIPSGPLKAEIAQRLEDVFAGKNTDLEVLMEWLKTRPILSPLTKGILGFVFTLTVPSERGLQRRRFVQNALNGNGDPNNMDKAVKLYRKLKREITFHGAKEISLSYSAGALASCMGLIYNRMGAVTTEVAFGLVCATCEQIADSQHRSHRQMVTTTNPLIRHENRMVLASTTAKAMEQMAGSSEQAAEAMEVASQARQMVQAMRTIGTHPSSSAGLKNDLLENLQAYQKRMGVQMQRFK

SEQ ID NO: 2 - protein, 944 aa, Human herpesvirus 4
MDKDRPGPPALDDNMEEEVPSTSVVQEQVSAGDWENVLIELSDSSSEKEAEDAHLEPAQKGTKRKRVDHDAGGSAPARPMLPPQPDLPGREAILRRFPLDLRTLLQAIGAAATRIDTRAIDQFFGSQISNTEMYIMYAMAIRQAIRDRRRNPASRRDQAKWRLQTLAAGWPMGYQAYSSWMYSYTDHQTTPTFVHLQATLGCTGGRRCHVTFSAGTFKLPRCTPGDRQWLYVQSSVGNIVQSCNPRYSIFFDYMAIHRSLTKIWEEVLTPDQRVSFMEFLGFLQRTDLSYIKSFVSDALGTTSIQTPWIDDNPSTETAQAWNAGFLRGRAYGIDLLRTEGEHVEGATGETREESEDTESDGDDEDLPCIVSRGGPKVKRPPIFIRRLHRLLLMRAGKRTEQGKEVLEKARGSTYGTPRPPVPKPRPEVPQSDETATSHGSAQVPEPPTIHLAAQGMAYPLHEQHGMAPCPVAQAPPTPLPPVSPGDQLPGVFSDGRVACAPVPAPAGPIVRPWEPSLTQAAGQAFAPVRPQHMPVEPVPVPTVALERPVYPKPVRPAPPKIAMQGPGETSGIRRARERWRPAPWTPNPPRSPSQMSVRDRLARLRAEAQVKQASVEVQPPQLTQVSPQQPMEGPLVPEQQMFPGAPFSQVADVVRAPGVPAMQPQYFDLPLIQPISQGAPVAPLRASMGPVPPVPATQPQYFDIPLTEPINQGASAAHFLPQQPMEGPLVPEQWMFPGAALSQSVRPGVAQSQYFDLPLTQPINHGAPAAHFLHQPPMEGPWVPEQWMFQGAPPSQGTDVVQHQLDALGYTLHGLNHPGVPVSPAVNQYHLSQAAFGLPIDEDESGEGSDTSEPCEALDLSIHGRPCPQAPEWPVQEEGGQDATEVLDLSIHGRPRPRTPEWPVQGEGGQNVTGPETRRVVVSAVVHMCQDDEFPDLQDPPDEA

SEQ ID NO: 3 - protein, 257 aa, Human respiratory syncytial virus B1
METYVNKLHEGSTYTAAVQYNVLEKDDDPASLTIWVPMFQSSVPADLSLIKELASINILVKQISTPKGPSLRVTINSRSAVLAQMPSNFIISANVSLDERSKLAYDVTTPCEIKACSLTCLKVKSMLTTVKDLTMKTFNPTHEIIALCEFENIMTSKRVIIPTYLRPISVKNKDLNSLENIATTEFKNAITNAKIIPYAGLVLVITVTDNKGAFKYIKPQSQFIVDLGAYLEKESIYYVTTNWKHTATRFSIKPLED

SEQ ID NO: 4 - protein, 2261 aa, Homo sapiens
MACWPQLRLLLWKNLTFRRRQTCQLLLEVAWPLFIFLILISVRLSYPPYEQHECHFPNKAMPSAGTLPWVQGIICNANNPCFRYPTPGEAPGVVGNFNKSIVARLFSDARRLLLYSQKDTSMKDMRKVLRTLQQIKKSSSNLKLQDFLVDNETFSGFLYHNLSLPKSTVDKMLRADVILHKVFLQGYQLHLTSLCNGSKSEEMIQLGDQEVSELCGLPREKLAAAERVLRSNMDILKPILRTLNSTSPFPSKELAEATKTLLHSLGTLAQELFSMRSWSDMRQEVMFLTNVNSSSSSTQIYQAVSRIVCGHPEGGGLKIKSLNWYEDNNYKALFGGNGTEEDAETFYDNSTTPYCNDLMKNLESSPLSRIIWKALKPLLVGKILYTPDTPATRQVMAEVNKTFQELAVFHDLEGMWEELSPKIWTFMENSQEMDLVRMLLDSRDNDHFWEQQLDGLDWTAQDIVAFLAKHPEDVQSSNGSVYTWREAFNETNQAIRTISRFMECVNLNKLEPIATEVWLINKSMELLDERKFWAGIVFTGITPGSIELPHHVKYKIRMDIDNVERTNKIKDGYWDPGPRADPFEDMRYVWGGFAYLQDVVEQAIIRVLTGTEKKTGVYMQQMPYPCYVDDIFLRVMSRSMPLFMTLAWIYSVAVIIKGIVYEKEARLKETMRIMGLDNSILWFSWFISSLIPLLVSAGLLVVILKLGNLLPYSDPSVVFVFLSVFAVVTILQCFLISTLFSRANLAAACGGIIYFTLYLPYVLCVAWQDYVGFTLKIFASLLSPVAFGFGCEYFALFEEQGIGVQWDNLFESPVEEDGFNLTTSVSMMLFDTFLYGVMTWYIEAVFPGQYGIPRPWYFPCTKSYWFGEESDEKSHPGSNQKRISEICMEEEPTHLKLGVSIQNLVKVYRDGMKVAVDGLALNFYEGQITSFLGHNGAGKTTTMSILTGLFPPTSGTAYILGKDIRSEMSTIRQNLGVCPQHNVLFDMLTVEEHIWFYARLKGLSEKHVKAEMEQMALDVGLPSSKLKSKTSQLSGGMQRKLSVALAFVGGSKVVILDEPTAGVDPYSRRGIWELLLKYRQGRTIILSTHHMDEADVLGDRIAIISHGKLCCVGSSLFLKNQLGTGYYLTLVKKDVESSLSSCRNSSSTVSYLKKEDSVSQSSSDAGLGSDHESDTLTIDVSAISNLIRKHVSEARLVEDIGHELTYVLPYEAAKEGAFVELFHEIDDRLSDLGISSYGISETTLEEIFLKVAEESGVDAETSDGTLPARRNRRAFGDKQSCLRPFTEDDAADPNDSDIDPESRETDLLSGMDGKGSYQVKGWKLTQQQFVALLWKRLLIARRSRKGFFAQIVLPAVFVCIALVFSLIVPPFGKYPSLELQPWMYNEQYTFVSNDAPEDTGTLELLNALTKDPGFGTRCMEGNPIPDTPCQAGEEEWTTAPVPQTIMDLFQNGNWTMQNPSPACQCSSDKIKKMLPVCPPGAGGLPPPQRKQNTADILQDLTGRNISDYLVKTYVQIIAKSLKNKIWVNEFRYGGFSLGVSNTQALPPSQEVNDAIKQMKKHLKLAKDSSADRFLNSLGRFMTGLDTKNNVKVWFNNKGWHAISSFLNVINNAILRANLQKGENPSHYGITAFNHPLNLTKQQLSEVALMTTSVDVLVSICVIFAMSFVPASFVVFLIQERVSKAKHLQFISGVKPVIYWLSNFVWDMCNYVVPATLVIIIFICFQQKSYVSSTNLPVLALLLLLYGWSITPLMYPASFVFKIPSTAYVVLTSVNLFIGINGSVATFVLELFTDNKLNNINDILKSVFLIFPHFCLGRGLIDMVKNQAMADALERFGENRFVSPLSWDLVGRNLFAMAVEGVVFFLITVLIQYRFFIRPRPVNAKLSPLNDEDEDVRRERQRILDGGGQNDILEIKELTKIYRRKRKPAVDRICVGIPPGECFGLLGVNGAGKSSTFKMLTGDTTVTRGDAFLNKNSILSNIHEVHQNMGYCPQFDAITELLTGREHVEFFALLRGVPEKEVGKVGEWAIRKLGLVKYGEKYAGNYSGGNKRKLSTAMALIGGPPVVFLDEPTTGMDPKARRFLWNCALSVVKEGRSVVLTSHSMEECEALCTRMAIMVNGRFRCLGSVQHLKNRFGDGYTIVVRIAGSNPDLKPVQDFFGLAFPGSVLKEKHRNMLQYQLPSSLSSLARIFSILSQSKKRLHIEDYSVSQTTLDQVFVNFAKDQSDDDHLKDLSLHKNQTVVDVAVLTSFLQDEKVKESYV

SEQ ID NO: 5 - protein, 197 aa, Homo sapiens
MPIPASPLHPPLPSLLLYLLLELAGVTHVFHVQQTEMSQTVSTGESIILSCSVPNTLPNGPVLWFKGTGPNRKLIYNFKQGNFPRVKEIGDTTKPGNTDFSTRIREISLADAGTYYCVKFIKGRAIKEYQSGRGTQVFVTEQNPRPPKNRPAGRAGSRAHHDAHTCLSALPERNSTNYFVQPCCCLRLLGLTGLLSK

SEQ ID NO: 6 - protein, 642 aa, Homo sapiens
MPCGEDWLSHPLGIVQGFFAQNGVNPDWEKKVIEYFKEKLKENNAPKWVPSLNEVPLHYLKPNSFVKFRCMIQDMFDPEFYMGVYETVNQNTKAHVLHFGKYRDVAECGPQQELDLNSPRNTTLERQTFYCVPVPGESTWVKEAYVNANQARVSPSTSYTPSRHKRSYEDDDDMDLQPNKQKDQHAGARQAGSVGGLQWCGEPKRLETEASTGQQLNSLNLSSPFDLNFPLPGEKGPACLVKVYEDWDCFKVNDILELYGILSVDPVLSILNNDERDASALLDPMECTDTAEEQRVHSPPASLVPRIHVILAQKLQHINPLLPACLNKEESKTCKFVSSFMSELSPVRAELLGFLTHALLGDSLAAEYLILHLISTVYTRRDVLPLGKFTVNLSGCPRNSTFTEHLYRIIQHLVPASFRLQMTIENMNHLKFIPHKDYTANRLVSGLLQLPSNTSLVIDETLLEQGQLDTPGVHNVTALSNLITWQKVDYDFSYHQMEFPCNINVFITSEGRSLLPADCQIHLQPQLIPPNMEEYMNSLLSAVLPSVLNKFRIYLTLLRFLEYSISDEITKAVEDDFVEMRKNDPQSITADDLHQLLVVARCLSLSAGQTTLSRERWLRAKQLESLRRTRLQQQKCVNGNEL

SEQ ID NO: 7 - protein, 255 aa, Homo sapiens
MSSHRRKAKGRNRRSHRAMRVAHLELATYELAATESNPESSHPGYEAAMADRPQPGWRESLKMRVSKPFGMLMLSIWILLFVCYYLSYYLCSGSSYFVLANGHILPNSENAHGQSLEEDSALEALLNFFFPTTCNLRENQVAKPCNELQDLSESECLRHKCCFSSSGTTSFKCFAPFRDVPKQMMQMFGLGAISLILVCLPIYCRSLFWRSEPADDLQRQDNRVVTGLKKQRRKRKRKSEMLQKAARGREEHGDE

SEQ ID NO: 8 - protein, 118 aa, Homo sapiens
MPREDAHFIYGYPKKGHGHSYTTAEEAAGIGILTVILGVLLLIGCWYCRRRNGYRALMDKSLHVGTQCALTRRCPQEGFDHRDSKVSLQEKNCEPVVPNAPPAYEKLSAEQSPPPYSP

SEQ ID NO: 9 - protein, 180 aa, Homo sapiens
MQAEGRGTGGSTGDADGPGGPGIPDGPGGNAGGPGEAGATGGRGPRGAGAARASGPGGGAPRGPHGGAASGLNGCCRCGARGPESRLLEFYLAMPFATPMEAELARRSLAQDAPPLPVPGVLLKEFTVSGNILTIRLTAADHRQLQLSISSCLQQLSLLMWITQCFLPVFLAQPPSGQRR

SEQ ID NO: 10 - protein, 661 aa, Homo sapiens
MDLVLKRCLLHLAVIGALLAVGATKVPRNQDWLGVSRQLRTKAWNRQLYPEWTEAQRLDCWRGGQVSLKVSNDGPTLIGANASFSIALNFPGSQKVLPDGQVIWVNNTIINGSQVWGGQPVYPQETDDACIFPDGGPCPSGSWSQKRSFVYVWKTWGQYWQVLGGPVSGLSIGTGRAMLGTHTMEVTVYHRRGSRSYVPLAHSSSAFTITDQVPFSVSVSQLRALDGGNKHFLRNQPLTFALQLHDPSGYLAEADLSYTWDFGDSSGTLISRALVVTHTYLEPGPVTAQVVLQAAIPLTSCGSSPVPGTTDGHRPTAEAPNTTAGQVPTTEVVGTTPGQAPTAEPSGTTSVQVPTTEVISTAPVQMPTAESTGMTPEKVPVSEVMGTTLAEMSTPEATGMTPAEVSIVVLSGTTAAQVTTTEWVETTARELPIPEPEGPDASSIMSTESITGSLGPLLDGTATLRLVKRQVPLDCVLYRYGSFSVTLDIVQGIESAEILQAVPSGEGDAFELTVSCQGGLPKEACMEISSPGCQPPAQRLCQPVLPSPACQLVLHQILKGGSGTYCLNVSLADTNSLAVVSTQLIMPGQEAGLGQVPLIVGILLVLMAVVLASLIYRRRLMKQDFSVPQLPHSSSHWLRLPRIFCSCPIGENSPLLSGQQV

SEQ ID NO: 11 - protein, 529 aa, Homo sapiens [sequence omitted]

SEQ ID NO: 12 - protein, 314 aa, Homo sapiens
MPLEQRSQHCKPEEGLEARGEALGLVGAQAPATEEQEAASSSSTLVEVTLGEVPAAESPDPPQSPQGASSLPTTMNYPLWSQSYEDSSNQEEEGPSTFPDLESEFQAALSRKVAELVHFLLLKYRAREPVTKAEMLGSVVGNWQYFFPVIFSKASSSLQLVFGIELMEVDPIGHLYIFATCLGLSYDGLLGDNQIMPKAGLLIIVLAIIAREGDCAPEEKIWEELSVLEVFEGREDSILGDPKKLLTQHFVQENYLEYRQVPGSDPACYEFLWGPRALVETSYVKVLHHMVKISGGPHISYPPLHEWVLREGEE

SEQ ID NO: 13 - protein, 303 aa, Homo sapiens
MATSRYEPVAEIGVGAYGTVYKARDPHSGHFVALKSVRVPNGGGGGGGLPISTVREVALLRRLEAFEHPNVVRLMDVCATSRTDREIKVTLVFEHVDQDLRTYLDKAPPPGLPAETIKDLMRQFLRGLDFLHANCIVHRDLKPENILVTSGGTVKLADFGLARIYSYQMALTPVVVTLWYRAPEVLLQSTYATPVDMWSVGCIFAEMFRRKPLFCGNSEADQLGKIFDLIGLPPEDDWPRDVSLPRGAFPPRGPRPVQSVVPEMEESGAQLLLEMLTFNPHKRISAFRALQHSYLHKDEGNPE

SEQ ID NO: 14 - protein, 44 aa, Homo sapiens
MADKPDMGEIASFDKAKLKKTETQEKNTLPTKETIEQEKRSEIS

SEQ ID NO: 15 - protein, 309 aa, Homo sapiens
MSLEQRSLHCKPEEALEAQQEALGLVCVQAATSSSSPLVLGTLEEVPTAGSTDPPQSPQGASAFPTTINFTRQRQPSEGSSSREEEGPSTSCILESLFRAVITKKVADLVGFLLLKYRAREPVTKAEMLESVIKNYKHCFPEIFGKASESLQLVFGIDVKEADPTGHSYVLVTCLGLSYDGLLGDNQIMPKTGFLIIVLVMIAMEGGHAPEEEIWEELSVMEVYDGREHSAYGEPRKLLTQDLVQEKYLEYRQVPDSDPARYEFLWGPRALAETSYVKVLEYVIKVSARVRFFFPSLREAALREEEEGV

SEQ ID NO: 16 - protein, 353 aa, Homo sapiens
MAHFPGFGQSLLFGYPVYVFGDCVQGDWCPISGGLCSARLHRHALLATCPEHQITWDPIDGRVIGSALQFLIPRLPSFPTQRTSKTLKVLTPPITHTTPNIPPSFLQAMRKYSPFRNGYMEPTLGQHLPTLSFPDPGLRPQNLYTLWGGSVVCMYLYQLSPPITWPLLPHVIFCHPGQLGAFLTNVPYKRIEELLYKISLTTGALIILPEDCLPTTLFQPARAPVTLTAWQNGLLPFHSTLTTPGLIWTFTDGTPMISGPCPKDGQPSLVLQSSSFIFHKFQTKAYHPSFLLSHGLIQYSSFHSLHLLFEEYTNIPISLLFNEKEADDNDHEPQISPGGLEPPSEKHFRETEV

SEQ ID NO: 17 - protein, 497 aa, Homo sapiens
MGSLEMVPMGAGPPSPGGDPDGYDGGNNSQYPSASGSSGNTPTPPNDEERESNEEPPPPYEDPYWGNGDRHSDYQPLGTQDQSLYLGLQHDGNDGLPPPPYSPRDDSSQHIYEEAGRGSMNPVCLPVIVAPYLFWLAAIAASCFTASVSTVVTATGLALSLLLLAAVASSYAAAQRKLLTPVTVLTAVVTFFAICLTWRIEDPPFNSLLFALLAAAGGLQGIYVLVMLVLLILAYRRRWRRLTVCGGIMFLACVLVLIVDAVLQLSPLLGAVTVVSMTLLLLAFVLWLSSPGGLGTLGAALLTLAAALALLASLILGTLNLTTMFLLMLLWTLVVLLICSSCSSCPLSKILLARLFLYALALLLLASALIAGGSILQTNFKSLSSTEFIPNLFCMLLLIVAGILFILAILTEWGSGNRTYGPVFMCLGGLLTMVAGAVWLTVMSNTLLSAWILTAGFLIFLIGFALFGVIRCCRYCCYYCLTLESEERPPTPYRNTV

SEQ ID NO: 18 - protein, 256 aa, Homo sapiens
MAHRPPSPALASVLLALLLSGAARAAEIVGGHEAQPHSRPYMASLQMRGNPGSHFCGGTLIHPSFVLTAAHCLRDIPQRLVNVVLGAHNVRTQEPTQQHFSVAQVFLNNYDAENKLNDVLLIQLSSPANLSASVATVQLPQQDQPVPHGTQCLAMGWGRVGAHDPPAQVLQELNVTVVTFFCRPHNICTFVPRRKAGICFGDSGGPLICDGIIQGIDSFVIWGCATRLFPDFFTRVALYVDWIRSTLRRVEAKGRP

SEQ ID NO: 19 - protein, 449 aa, Homo sapiens
MGSDVRDLNALLPAVPSLGGGGGCALPVSGAAQWAPVLDFAPPGASAYGSLGGPAPPPAPPPPPPPPPHSFIKQEPSWGGAEPHEEQCLSAFTVHFSGQFTGTAGACRYGPFGPPPPSQASSGQARMFPNAPYLPSCLESQPAIRNQGYSTVTFDGTPSYGHTPSHHAAQFPNHSFKHEDPMGQQGSLGEQQYSVPPPVYGCHTPTDSCTGSQALLLRTPYSSDNLYQMTSQLECMTWNQMNLGATLKGVAAGSSSSVKWTEGQSNHSTGYESDNHTTPILCGAQYRIHTHGVFRGIQDVRRVPGVAPTLVRSASETSEKRPFMCAYPGCNKRYFKLSHLQMHSRKHTGEKPYQCDFKDCERRFSRSDQLKRHQRRHTGVKPFQCKTCQRKFSRSDHLKTHTRTHTGKTSEKPFSCRWPSCQKKFARSDELVRHHNMHQRNMTKLQLAL

SEQ ID NO: 20 - protein, 561 aa, Homo sapiens
MESRGRRCPEMISVLGPISGHVLKAVFSRGDTPVLPHETRLLQTGIHVRVSQPSLILVSQYTPDSTPCHRGDNQLQVQHTYFTGSEVENVSVNVHNPTGRSICPSQEPMSIYVYALPLKMLNIPSINVHHYPSAAERKHRHLPVADAVIHASGKQMWQARLTVSGLAWTRQQNQWKEPDVYYTSAFVFPTKDVALRHVVCAHELVCSMENTRATKMQVIGDQYVKVYLESFCEDVPSGKLFMHVTLGSDVEEDLTMTRNPQPFMRPHERNGFTVLCPKNMIIKPGKISHIMLDVAFTSHEHFGLLCPKSIPGLSISGNLLMNGQQIFLEVQAIRETVELRQYDPVAALFFFDIDLLLQRGPQYSEHPTFTSQYRIQGKLEYRHTWDRHDEGAAQGDDDVWTSGSDSDEELVTTERKTPRVTGGGAMASASTSAGRKRKSASSATACTAGVMTRGRLKAESTVAPEEDTDEDSDNEIHNPAVFTWPPWQAGILARNLVPMVATVQGQNLKYQEFFWDANDIYRIFAELEGVWQPAAQPKRRRHRQDALPGPCIASTPKKHRG

SEQ ID NO: 21 - protein, 386 aa, Epstein-Barr virus
MEHDLERGPPGPRRPPRGPPLSSSLGLALLLLLLALLFWLYIVMSDWTGGALLVLYSFALMLIIIILIIFIFRRDLLCPLGALCILLLMITLLLIALWNLHGQALFLGIVLFIFGCLLVLGIWIYLLEMLWRLGATIWQLLAFFLAFFLDLILLIIALYLQQNWWTLLVDLLWLLLFLAILIWMYYHGQRHSDEHHHDDSLPHPQQATDDSGHESDSNSNEGRHHLLVSGAGDGPPLCSQNLGAPGGGPDNGPQDPDNTDDNGPQDPDNTDDNGPHDPLPQDPDNTDDNGPQDPDNTDDNGPHDPLPHSPSDSAGNDGGPPQLTEEVENKGGDQGPPLMTDGGGGHSHDSGHGGGDPHLPTLLLGSSGSGGDDDDPHGPVQLSYYD

SEQ ID NO: 22 - protein, 944 aa, Epstein-Barr virus; identical to SEQ ID NO: 2

SEQ ID NO: 23 - protein, 641 aa, Epstein-Barr virus
MSDEGPGTGPGNGLGEKGDTSGPEGSGGSGPQRRGGDNHGRGRGRGRGRGGGRPGAPGGSGSGPRHRDGVRRPQKRPSCIGCKGTHGGTGAGAGAGGAGAGGAGAGGGAGAGGGAGGAGGAGGAGAGGGAGAGGGAGGAGGAGAGGGAGAGGGAGGAGAGGGAGGAGGAGAGGGAGAGGGAGGAGAGGGAGGAGGAGAGGGAGAGGAGGAGGAGAGGAGAGGGAGGAGGAGAGGAGAGGAGAGGAGAGGAGGAGAGGAGGAGAGGAGGAGAGGGAGGAGAGGGAGGAGAGGAGGAGAGGAGGAGAGGAGGAGAGGGAGAGGAGAGGGGRGRGGSGGRGRGGSGGRGRGGSGGRRGRGRERARGGSRERARGRGRGRGEKRPRSPSSQSSSSGSPPRRPPPGRRPFFHPVGEADYFEYHQEGGPDGEPDVPPGAIEQGPADDPGEGPSTGPRGQGDGGRRKKGGWFGKHRGQGGSNPKFENIAEGLRALLARSHVERTTDEGTWVAGVFVYGGSKTSLYNLRRGTALAIPQCRLTPLSRLPFGMAPGPGPQPGPLRESIVCYFMVFLQTHIFAEVLKDAIKDLVMTKPAPTCNIRVTVCSFDDGVDLPPWFPPMVEGAAAEGDDGDDGDEGGDGDEGEEGQE

SEQ ID NO: 24 - protein, 212 aa, Homo sapiens
MSGYSSDRDRGRDRGFGAPRFGGSRAGPLSGKKFGNPGEKLVKKKWNLDELPKFEKNFYQEHPDLARRTAQEVETYRRSKEITVRGHNCPKPVLNFYEANFPANVMDVIARQNFTEPTAIQAQGWPVALSGLDMVGVAQTGSGKTLSYLLPAIVHINHQPFLERGDGPICLVLAPTRELAQQVQQVAAEYCRACRLKSTCIYGGAPKGPQIR

SEQ ID NO: 25 - protein, 529 aa, Homo sapiens [sequence omitted]

SEQ ID NO: 26 - protein, 488 aa, Homo sapiens
MGKFLATLILFFQFCPLIFGDYSPSCCTLTIGVSSYHSKPCNPAQPVCSWTLDLLALSADQALQPPCPNLVSYSSYHATYSLYLFPHWTKKPNRNGGGYYSASYSDPCSLKCPYLGCQSWTCPYTGAVSSPYWKFQHDVNFTQEVSRLNINLHFSKCGFPFSLLVDAPGYDPIWFLNTEPSQLPPTAPPLLPHSNLDHILEPSIPWKSKLLTLVQLTLQSTNYTCIVCIDRASLSTWHVLYSPNVSVPSSSSTPLLYPSLALPAPHLTLPFNWTHCFDPQIQAIVSSPCHNSLILPPFSLSPVPTLGSRSRRAVPVAVWLVSALAMGAGVAGGITGSMSLASGKSLLHEVDKDISQLTQAIVKNHKNLLKIAQYAAQNRRGLDLLFWEQGGLCKALQEQCRFPNITNSHVPILQERPPLENRVLTGWGLNWDLGLSQWAREALQTGITLVALLLLVILAGPCILRQLRHLPSRVRYPHYSLIKPESSL

SEQ ID NO: 27 - protein, 1019 aa, Homo sapiens
MCICGTAHPVLDEGPVRCRAGPRDLLEARRPRAHECLGEALRVMHQIISKYPLLNTVETLTAAGTLIAKVKAFHYESNNDLEKQEFEKALETIAVAFSSTVSEFLMGEVDSSTLLAVPPGDSSQSMESLYGPGSEGTPPSLEDCDAGCLPAEEVDVLLQRCEGGVDAALLYAKNMAKYMKDLISYLEKRTTLEMEFAKGLQKIAHNCRQSVMQEPHMPLLSIYSLALEQDLEFGHSMVQAVGTLQTQTFMQPLTLRRLEHEKRRKEIKEAWHRAQRKLQEAESNLRKAKQGYVQRCEDHDKARFLVAKAEEEQAGSAPGAGSTATKTLDKRRRLEEEAKNKAEEAMATYRTCVADAKTQKQELEDTKVTALRQIQEVIRQSDQTIKSATISYYQMMHMQTAPLPVHFQMLCESSKLYDPGQQYASHVRQLQRDQEPDVHYDFEPHVSANAWSPVMRARKSSFNVSDVARPEAAGSPPEEGGCTEGTPAKDHRAGRGHQVHKSWPLSISDSDSGLDPGPGAGDFKKFERTSSSGTMSSTEELVDPDGGAGASAFEQADLNGMTPELPVAVPSGPFRHEGLSKAARTHRLRKLRTPAKCRECNSYVYFQGAECEECCLACHKKCLETLAIQCGHKKLQGRLQLFGQDFSHAARSAPDGVPFIVKKCVCEIERRALRTKGIYRVNGVKTRVEKLCQAFENGKELVELSQASPHDISNVLKLYLRQLPEPLISFRLYHELVGLAKDSLKAEAEAKAASRGRQDGSESEAVAVALAGRLRELLRDLPPENRASLQYLLRHLRRIVEVEQDNKMTPGNLGIVFGPTLLRPRPTEATVSLSSLVDYPHQARVIETLIVHYGLVFEEEPEETPGGQDESSNQRAEVVVQVPYLEAGEAVVYPLQEAAADGCRESRVVSNDSDSDLEEASELLSSSEASALGHLSFLEQQQSEASLEVASGSHSGSEEQLEATAREDGDGDEDGPAQQLSGFNTNQSNNVLQAPLPPMRLRGGRMTLGSCRERQPEFV

SEQ ID NO: 28 - protein, 1018 aa, Homo sapiens
MEDEEGPEYGKPDFVLLDQVTMEDFMRNLQLRFEKGRIYTYIGEVLVSVNPYQELPLYGPEAIARYQGRELYERPPHLYAVANAAYKAMKHRSRDTCIVISGESGAGKTEASKHIMQYIAAVTNPSQRAEVERVKDVLLKSTCVLEAFGNARTNRNHNSSRFGKYMDINFDFKGDPIGGHIHSYLLEKSRVLKQHVGERNFHAFYQLLRGSEDKQLHELHLERNPAVYNFTHQGAGLNMTVHSALDSDEQSHQAVTEAMRVIGFSPEEVESVHRILAAILHLGNIEFVETEEGGLQKEGLAVAEEALVDHVAELTATPRDLVLRSLLARTVASGGRELIEKGHTAAEASYARDACAKAVYQRLFEWVVNRINSVMEPRGRDPRRDGKDTVIGVLDIYGFEVFPVNSFEQFCINYCNEKLQQLFIQLILKQEQEEYEREGITWQSVEYFNNATIVDLVERPHRGILAVLDEACSSAGTITDRIFLQTLDMHHRHHLHYTSRQLCPTDKTMEFGRDFRIKHYAGDVTYSVEGFIDKNRDFLFQDFKRLLYNSTDPTLRAMWPDGQQDITEVTKRPLTAGTLFKNSMVALVENLASKEPFYVRCIKPNEDKVAGKLDENHCRHQVAYLGLLENVRVRRAGFASRQPYSRFLLRYKMTCEYTWPNHLLGSDKAAVSALLEQHGLQGDVAFGHSKLFIRSPRTLVTLEQSRARLIPIIVLLLQKAWRGTLARWRCRRLRAIYTIMRWFRRHKVRAHLAELQRRFQAARQPPLYGRDLVWPLPPAVLQPFQDTCHALFCRWRARQLVKNIPPSDMPQIKAKVAAMGALQGLRQDWGCRRAWARDYLSSATDNPTASSLFAQRLKTLQDKDGFGAVLFSSHVRKVNRFHKIRNRALLLTDQHLYKLDPDRQYRVMRAVPLEAVTGLSVTSGGDQLVVLHARGQDDLVVCLHRSRPPLDNRVGELVGVLAAHCQGEGRTLEVRVSDCIPLSHRGVRRLISVEPRPEQPEPDFRCARGSFTLLWPSR

SEQ ID NO: 29 - protein, 760 aa, Homo sapiens
MMDQARSAFSNLFGGEPLSYTRFSLARQVDGDNSHVEMKLAVDEEENADNNTKANVTKPKRCSGSICYGTIAVIVFFLIGFMIGYLGYCKGVEPKTECERLAGTESPVREEPGEDFPAARRLYWDDLKRKLSEKLDSTDFTGTIKLLNENSYVPREAGSQKDENLALYVENQFREFKLSKVWRDQHFVKIQVKDSAQNSVIIVDKNGRLVYLVENPGGYVAYSKAATVTGKLVHANFGTKKDFEDLYTPVNGSIVIVRAGKITFAEKVANAESLNAIGVLIYMDQTKFPIVNAELSFFGHAHLGTGDPYTPGFPSFNHTQFPPSRSSGLPNIPVQTISRAAAEKLFGNMEGDCPSDWKTDSTCRMVTSESKNVKLTVSNVLKEIKILNIFGVIKGFVEPDHYVVVGAQRDAWGPGAAKSGVGTALLLKLAQMFSDMVLKDGFQPSRSIIFASWSAGDFGSVGATEWLEGYLSSLHLKAFTYINLDKAVLGTSNFKVSASPLLYTLIEKTMQNVKHPVTGQFLYQDSNWASKVEKLTLDNAAFPFLAYSGIPAVSFCFCEDTDYPYLGTTMDTYKELIERIPELNKVARAAAEVAGQFVIKLTHDVELNLDYERYNSQLLSFVRDLNQYRADIKEMGLSLQWLYSARGDFFRATSRLTTDFGNAEKTDRFVMKKLNDRVMRVEYHFLSPYVSPKESPFRHVFWGSGSHTLPALLENLKLRKQNNGAFNETLFRNQLALATWTIQGAANALSGDVWDIDNEF

SEQ ID NO: 30 - protein, 510 aa, Homo sapiens
MDGFYDQQVPFMVPGKSRSEECRGRPVIDRKRKFLDTDLAHDSEELFQDLSQLQEAWLAEAQVPDDEQFVPDFQSDNLVLHAPPPTKIKRELHSPSSELSSCSHEQALGANYGEKCLYNYCAYDRKPPSGFKPLTPPTTPLSPTHQNPLFPPPQATLPTSGHAPAAGPVQGVGPAPAPHSLPEPGPQQQTFAVPRPPHQPLQMPKMMPENQYPSEQRFQRQLSEPCHPFPPQPGVPGDNRPSYHRQMSEPIVPAAPPPPQGFKQEYHDPLYEHGVPGMPGPPAHGFQSPMGIKQEPRDYCVDSEVPNCQSSYMRGGYFSSSHEGFSYEKDPRLYFDDTCVVPERLEGKVKQEPTMYREGPPYQRRGSLQLWQFLVTLLDDPANAHFIAWTGRGMEFKLIEPEEVARRWGIQKNRPAMNYDKLSRSLRYYYEKGIMQKVAGERYVYKFVCDPDALFSMAFPDNQRPFLKAESECHLSEEDTLPLTHFEDSPAYLLDMDRCSSLPYAEGFAY

SEQ ID NO: 31 - protein, 491 aa, Homo sapiens
MCNTNMSVPTDGAVTTSQIPASEQETLVRPKPLLLKLLKSVGAQKDTYTMKEVLFYLGQYIMTKRLYDEKQQHIVYCSNDLLGDLFGVPSFSVKEHRKIYTMIYRNLVVVNQQESSDSGTSVSENRCHLEGGSDQKDLVQELQEEKPSSSHLVSRPSTSSRRRAISETEENSDELSGERQRKRHKSDSISLSFDESLALCVIREICCERSSSSESTGTPSNPDLDAGVSEHSGDWLDQDSVSDQFSVEFEVESLDSEDYSLSEEGQELSDEDDEVYQVTVYQAGESDTDSFEEDPEISLADYWKCTSCNEMNPPLPSHCNRCWALRENWLPEDKGKDKGEISEKAKLENSTQAEEGFDVPDCKKTIVNDSRESCVEENDDKITQASQSQESEDYSQPSTSSSIIYSSQEDVKEFEREETQDKEESVESSLPLNAIEPCVICQGRPKNGCIVHGKTGHLMACFTCAKKLKKRNKPCPVCRQPIQMIVLTYFP

SEQ ID NO: 32 - protein, 437 aa, Homo sapiens
MTQFLPPNLLALFAPRDPIPYLPPLEKLPHEKHHNQPYCGIAPYIREFEDPRDAPPPTRAETREERMERKRREKIERRQQEVETELKMWDPHNDPNAQGDAFKTLFVARVNYDTTESKLRREFEVYGPIKRIHMVYSKRSGKPRGYAFIEYEHERDMHSAYKHADGKKIDGRRVLVDVERGRTVKGWRPRRLGGGLGGTRRGGADVNIRHSGRDDTSRYDERPGPSPLPHRDRDRDRERERRERSRERDKERERRRSRSRDRRRRSRSRDKEERRRSRERSKDKDRDRKRRSSRSRERARRERERKEELRGGGGDMAEPSEAGDAPPDDGPPGELGPDGPDGPEEKGRDRDRERRRSHRSERERRRDRDRDRDRDREHKRGERGSERGRDEARGGGGGQDNGLEGLGNDSRDMYMESEGGDGYLAPENGYLMEAAPE

SEQ ID NO: 33 - protein, 454 aa, Homo sapiens
MELATRYQIPKEVADIFNAPSDDEEFVGFRDDVPMETLSSEESCDSFDSLESGKQQDVRFHSKYFTEELRRIFIEDTDSETEDFAGFTQSDLNGKTNPEVMVVESDLSDDGKASLVSEEEEDEEEDKATPRRSRSRRSSIGLRVAFQFPTKKLANKPDKNSSSEQLFSSARLQNEKKTILERKKDCRQVIQREDSTSESEDDSRDESQESSDALLKRTMNIKENKAMLAQLLAELNSMPDFFPVRTPTSASRKKTVRRAFSEGQITRRMNPTRSARPPEKFALENFTVSAAKFAEEFYSFRRRKTIGGKCREYRRRHRISSFRPVEDITEEDLENVAITVRDKIYDKVLGNTCHQCRQKTIDTKTVCRNQGCCGVRGQFCGPCLRNRYGEDVRSALLDPDWVCPPCRGICNCSYCRKRDGRCATGILIHLAKFYGYDNVKEYLESLQKELVEDN

SEQ ID NO: 34 - protein, 313 aa, Homo sapiens
MLLSKINSLAHLRAAPCNDLHATKLAPGKEKEPLESQYQVGPLLGSGGFGSVYSGIRVSDNLPVAIKHVEKDRISDWGELPNGTRVPMEVVLLKKVSSGFSGVIRLLDWFERPDSFVLILERPEPVQDLFDFITERGALQEELARSFFWQVLEAVRHCHNCGVLHRDIKDENILIDLNRGELKLIDFGSGALLKDTVYTDFDGTRVYSPPEWIRYHRYHGRSAAVWSLGILLYDMVCGDIPFEHDEEIIRGQVFFRQRVSSECQHLIRWCLALRPSDRPTFEEIQNHPWMQDVLLPQETAEIHLHSLSPGPSK

SEQ ID NO: 35 - protein, 370 aa, Homo sapiens
MFQASMRSPNMEPFKQQKVEDFYDIGEELGSGQFAIVKKCREKSTGLEYAAKFIKKRQSRASRRGVSREEIEREVSILRQVLHHNVITLHDVYENRTDVVLILELVSGGELFDFLAQKESLSEEEATSFIKQILDGVNYLHTKKIAHFDLKPENIMLLDKNIPIPHIKLIDFGLAHEIEDGVEFKNIFGTPEFVAPEIVNYEPLGLEADMWSIGVITYILLSGASPFLGDTKQETLANITAVSYDFDEEFFSQTSELAKDFIRKLLVKETRKRLTIQEALRHPWITPVDNQQAMVRRESVVNLENFRKQYVRRRWKLSFSIVSLCNHLTRSLMKKVHLRPDEDLRNCESDTEEDIARRKALHPRRRSSTS

SEQ ID NO: 36 - protein, 209 aa, Homo sapiens
MVNFVSAGLFRCLPVSCPEDLLVEELVDGLLSLEEELKDKEEEEAVLDGLLSLEEESRGRLRRGPPGEKAPPRGETHRDRQRRAEEKRKRKKEREKEEEKQTAEYLKRKEEEKARRRRRAEKKAADVARRKQEEQERRERKWRQGAEKAKQHSARKEKMQELGIDGYTRQLEGEVESLEAERRKLLQEKEDLMGEVNYWQGRLEAMWLQ

SEQ ID NO: 37 - protein, 842 aa, Homo sapiens
MKGLCAECGQDLTQLQSKNGKQQVPLSTATVSMVHSVPELMVSSEQAEQLGREDQQRLHRNRKLVLMVDLDQTLIHTTEQHCQQMSNKGIFHFQLGRGEPMLHTRLRPHCKDFLEKIAKLYELHVFTFGSRLYAHTIAGFLDPEKKLFSHRILSRDECIDPFSKTGNLRNLFPCGDSMVCIIDDREDVWKFAPNLITVKKYVYFQGTGDMNAPPGSRESQTRKKVNHSRGTEVSEPSPPVRDPEGVTQAPGVEPSNGLEKPARELNGSEAATPRDSPRPGKPDERDIWPPAQAPTSSQELAGAPEPQGSCAQGGRVAPGQRPAQGATGTDLDFDLSSDSESSSESEGTKSSSSASDGESEGKRGRQKPKAAPEGAGALAQGSSLEPGRPAAPSLPGEAEPGAHAPDKEPELGGQEEGERDGLCGLGNGCADRKEAETESQNSELSGVTAGESLDQSMEEEEEEDTDEDDHLIYLEEILVRVHTDYYAKYDRYLNKEIEEAPDIRKIVPELKSKVLADVAIIFSGLHPTNFPIEKTREHYHATALGAKILTRLVLSPDAPDRATHLIAARAGTEKVLQAQECGHLHVVNPDWLWSCLERWDKVEEQLFPLRDDHTKAQRENSPAAFPDREGVPPTALFHPMPVLPKAQPGPEVRIYDSNTGKLIRTGARGPPAPSSSLPIRQEPSSFRAVPPPQPQMFGEELPDAQDGEQPGPSRRKRQPSMSETMPLYTLCKEDLESMDKEVDDILGEGSDDSDSEKRRPEEQEEEPQPRKPGTRRERTLGAPASSERSAAGGRGPRGHKRKLNEEDAASESSRESSNEDEGSSSEADEMAKALEAELNDLM

SEQ ID NO: 38 - protein, 556 aa, Homo sapiens [sequence omitted]

SEQ ID NO: 39 - protein, 724 aa, Homo sapiens
MSFPKAPLKRFNDPSGCAPSPGAYDVKTLEVLKGPVSFQKSQRFKQQKESKQNLNVDKDTTLPASARKVKSSESKESQKNDKDLKILEKEIRVLLQERGAQDRRIQDLETELEKMEARLNAALREKTSLSANNATLEKQLIELTRTNELLKSKFSENGNQKNLRILSLELMKLRNKRETKMRGMMAKQEGMEMKLQVTQRSLEESQGKIAQLEGKLVSIEKEKIDEKSETEKLLEYIEEISCASDQVEKYKLDIAQLEENLKEKNDEILSLKQSLEENIVILSKQVEDLNVKCQLLEKEKEDHVNRNREHNENLNAEMQNLKQKFILEQQEREKLQQKELQIDSLLQQEKELSSSLHQKLCSFQEEMVKEKNLFEEELKQTLDELDKLQQKEEQAERLVKQLEEEAKSRAEELKLLEEKLKGKEAELEKSSAAHTQATLLLQEKYDSMVQSLEDVTAQFESYKALTASEIEDLKLENSSLQEKAAKAGKNAEDVQHQILATESSNQEYVRMLLDLQTKSALKETEIKEITVSFLQKITDLQNQLKQQEEDFRKQLEDEEGRKAEKENTTAELTEEINKWRLLYEELYNKTKPFQLQLDAFEVEKQALLNEHGAAQEQLNKIRDSYAKLLGHQNLKQKIKHVVKLKDENSQLKSEVSKLRCQLAKKKQSETKLQEELNKVLGIKHFDPSKAFHHESKENFALKTPLKEGNTNCYRAPMECQESWK

SEQ ID NO: 40 - protein, 437 aa, Homo sapiens
MASVAVDPQPSVVTRVVNLPLVSSTYDLMSSAYLSTKDQYPYLKSVCEMAENGVKTITSVAMTSALPIIQKLEPQIAVANTYACKGLDRIEERLPILNQPSTQIVANAKGAVTGAKDAVTTTVTGAKDSVASTITGVMDKTKGAVTGSVEKTKSVVSGSINTVLGSRMMQLVSSGVENALTKSELLVEQYLPLTEEELEKEAKKVEGFDLVQKPSYYVRLGSLSTKLHSRAYQQALSRVKEAKQKSQQTISQLHSTVHLIEFARKNVYSANQKIQDAQDKLYLSWVEWKRSIGYDDTDESHCAEHIESRTLAIARNLTQQLQTTCHTLLSNIQGVPQNIQDQAKHMGVMAGDIYSVFRNAASFKEVSDSLLTSSKGQLQKMKESLDDVMDYLVNNTPLNWLVGPFYPQLTESQNAQDQGAEMDKSSQETQRSEHKTH

SEQ ID NO: 41 - protein, 509 aa, Homo sapiens
MERRRLWGSIQSRYISMSVWTSPRRLVELAGQSLLKDEALAIAALELLPRELFPPLFMAAFDGRHSQTLKAMVQAWPFTCLPLGVLMKGQHLHLETFKAVLDGLDVLLAQEVRPRRWKLQVLDLRKNSHQDFWTVWSGNRASLYSFPEPEAAQPMTKKRKVDGLSTEAEQPFIPVEVLVDLFLKEGACDELFSYLIEKVKRKKNVLRLCCKKLKIFAMPMQDIKMILKMVQLDSIEDLEVTCTWKLPTLAKFSPYLGQMINLRRLLLSHIHASSYISPEKEEQYIAQFTSQFLSLQCLQALYVDSLFFLRGRLDQLLRHVMNPLETLSITNCRLSEGDVMHLSQSPSVSQLSVLSLSGVMLTDVSPEPLQALLERASATLQDLVFDECGITDDQLLALLPSLSHCSQLTTLSFYGNSISISALQSLLQHLIGLSNLTHVLYPVPLESYEDIHGTLHLERLAYLHARLRELLCELGRPSMVWLSANPCPHCGDRTFYDPEPILCPCFMPN

SEQ ID NO: 42 - protein, 356 aa, Homo sapiens [sequence omitted]

SEQ ID NO: 43 - protein, 1273 aa, Homo sapiens
MQKGIRLNDGHVASLGLLARKDGTRKGYLSKRSSDNTKWQTKWFALLQNLLFYFESDSSSRPSGLYLLEGCVCDRAPSPKPALSAKEPLEKQHYFTVNFSHENQKALELRTEDAKDCDEWVAAIAHASYRTLATEHEALMQKYLHLLQIVETEKTVAKQLRQQIEDGEIEIERLKAEITSLLKDNERIQSTQTVAPNDEDSDIKKIKKVQSFLRGWLCRRKWKTIIQDYIRSPHADSMRKRNQVVFSMLEAEAEYVQQLHILVNNFLRPLRMAASSKKPPITHDDVSSIFLNSETIMFLHQIFYQGLKARISSWPTLVLADLFDILLPMLNIYQEFVRNHQYSLQILAHCKQNRDFDKLLKHYEAKPDCEERTLETFLTYPMFQIPRYILTLHELLAHTPHEHVERNSLDYAKSKLEELSRIMHDEVSETENIRKNLAIERMIIEGCEILLDTSQTFVRQGSLIQVPMSEKGKITRGRLGSLSLKKEGERQCFLFSKHLIICTRGSGGKLHLTKNGVISLIDCTLLEEPESTEEEAKGSGQDIDHLDFKIGVEPKDSPPFTVILVASSRQEKAAWTSDISQCVDNIRCNGLMMNAFEENSKVTVPQMIKRTREGTREAEMSRSDASLYCDDVDIRFSKTMNSCKVLQIRYASVERLLERLTDLRFLSIDFLNTFLHSYRVFTTAIVVLDKLITIYKKPISAIPARWLRSLELLFASGQNNKLLYGEPPKSPRATRKFSSPPPLSITKTSSPSRRRKLSLNIPIITGGKALDLAALSCNSNGYTSMYSAMSPFSKATLDTSKLYVSSSFTNKIPDEGDTTPEKPEDPSALSKQSSEVSMREESDIDQNQSDDGDTETSPTKSPTTPKSVKNKNSSEFPLFSYNNGVVMTSCRELDNNRSALSAASAFAIATAGANEGTPNKEKYRRMSLASAGFPPDQRNGDKEFVIRRAATNRVLNVLRHWVSKHSQDFETNDELKCKVIGFLEEVMHDPELLTQERKAAANIIRTLTQEDPGDNQITLEEITQMAEGVKAEPFENHSALEIAEQLTLLDHLVFKKIPYEEFFGQGWMKLEKNERTPYIMKTTKHFNDISNLIASEIIRNEDINARVSAIEKWVAVADICRCLHNYNAVLEITSSMNRSAIFRLKKTWLKVSKQTKALIDKLQKLVSSEGRFKNLREALKNCDPPCVPYLGMYLTDLAFIEEGTPNYTEDGLVNFSKMRMISHIIREIRQFQQTAYKIEHQAKVTQYLLDQSFVMDEESLYESSLRIEPKLPT

SEQ ID NO: 44 - protein, 154 aa, Homo sapiens
MAAKQPPPLMKKHSQTDLVSRLKTRKILGVGGEDDDGEVHRSKISQVLGNEIKFTIREPLGLRVWQFVSAVLFSGIAIMALAFPDQLYDAVFDGAQVTSKTPIRLYGGALLNAAPTPRPLMKLSAGDVLPSCGHWWNTPSGLELAVATICKERS

SEQ ID NO: 45 - protein, 491 aa, Homo sapiens; identical to SEQ ID NO: 31

SEQ ID NO: 46 - protein, 72 aa, Homo sapiens
MRVNVDKVLERDQKLSELDDRADALQAGASQFETSAAKLKRKYWWKNCKMWAIGITVLVIFIIIIIVWVVSS

SEQ ID NO: 47 - protein, 533 aa, Homo sapiens
MAPKPKPWVQTEGPEKKKGRQAGREEDPFRSTAEALKAIPAEKRIIRVDPTCPLSSNPGTQVYEDYNCTLNQTNIENNNNKFYIIQLLQDSNRFFTCWNRWGRVGEVGQSKINHFTRLEDAKKDFEKKFREKTKNNWAERDHFVSHPGKYTLIEVQAEDEAQEAVVKVDRGPVRTVTKRVQPCSLDPATQKLITNIFSKEMFKNTMALMDLDVKKMPLGKLSKQQIARGFEALEALEEALKGPTDGGQSLEELSSHFYTVIPHNFGHSQPPPINSPELLQAKKDMLLVLADIELAQALQAVSEQEKTVEEVPHPLDRDYQLLKCQLQLLDSGAPEYKVIQTYLEQTGSNHRCPTLQHIWKVNQEGEEDRFQAHSKLGNRKLLWHGTNMAVVAAILTSGLRIMPHSGGRVGKGIYFASENSKSAGYVIGMKCGAHHVGYMFLGEVALGREHHINTDNPSLKSPPPGFDSVIARGHTEPDPTQDTELELDGQQVVVPQGQPVPCPEFSSSTFSQSEYLIYQESQCRLRYLLEVHL

SEQ ID NO: 48 - protein, 1617 aa, Homo sapiens
MNMKQKSVYQQTKALLCKNFLKKWRMKRESLLEWGLSILLGLCIALFSSSMRNVQFPGMAPQNLGRVDKFNSSSLMVVYTPISNLTQQIMNKTALAPLLKGTSVIGAPNKTHMDEILLENLPYAMGIIFNETFSYKLIFFQGYNSPLWKEDFSAHCWDGYGEFSCTLTKYWNRGFVALQTAINTAIIEITTNHPVMEELMSVTAITMKTLPFITKNLLHNEMFILFFLLHFSPLVYFISLNVTKERKKSKNLMKMMGLQDSAFWLSWGLIYAGFIFIISIFVTIIITFTQIIVMTGFMVIFILFFLYGLSLVALVFLMSVLLKKAVLTNLVVFLLTLFWGCLGFTVFYEQLPSSLEWILNICSPFAFTTGMIQIIKLDYNLNGVIFPDPSGDSYTMIATFSMLLLDGLIYLLLALYFDKILPYGDERHYSPLFFLNSSSCFQHQRTNAKVIEKEIDAEHPSDDYFEPVAPEFQGKEAIRIRNVKKEYKGKSGKVEALKGLLFDIYEGQITAILGHSGAGKSSLLNILNGLSVPTEGSVTIYNKNLSEMQDLEEIRKITGVCPQFNVQFDILTVKENLSLFAKIKGIHLKEVEQEVQRILLELDMQNIQDNLAKHLSEGQKRKLTFGITILGDPQILLLDEPTTGLDPFSRDQVWSLLRERRADHVILFSTQSMDEADILADRKVIMSNGRLKCAGSSMFLKRRWGLGYHLSLHRNEICNPEQITSFITHHIPDAKLKTENKEKLVYTLPLERTNTFPDLFSDLDKCSDQGVTGYDISMSTLNEVFMKLEGQSTIEQDFEQVEMIRDSESLNEMELAHSSFSEMQTAVSDMGLWRMQVFAMARLRFLKLKRQTKVLLTLLLVFGIAIFPLIVENIMYAMLNEKIDWEFKNELYFLSPGQLPQEPRTSLLIINNTESNIEDFIKSLKHQNILLEVDDFENRNGTDGLSYNGAIIVSGKQKDYRFSVVCNTKRLHCFPILMNIISNGLLQMFNHTQHIRIESSPFPLSHIGLWTGLPDGSFFLFLVLCSISPYITMGSISDYKKNAKSQLWISGLYTSAYWCGQALVDVSFFILILLLMYLIFYIENMQYLLITSQIVFALVIVTPGYAASLVFFIYMISFIFRKRRKNSGLWSFYFFFASTIMFSITLINHFDLSILITTMVLVPSYTLLGFKTFLEVRDQEHYREFPEANFELSATDFLVCFIPYFQTLLFVFVLRCMELKCGKKRMRKDPVFRISPQSRDAKPNPEEPIDEDEDIQTERIRTATALTTSILDEKPVIIASCLHKEYAGQKKSCFSKRKKKIAARNISFCVQEGEILGLLGPNGAGKSSSIRMISGITKPTAGEVELKGCSSVLGHLGYCPQENVLWPMLTLREHLEVYAAVKGLRKADARLAIARLVSAFKLHEQLNVPVQKLTAGITRKLCFVLSLLGNSPVLLLDEPSTGIDPTGQQQMWQAIQAVVKNTERGVLLTTHNLAEAEALCDRVAIMVSGRLRCIGSIQHLKNKLGKDYILELKVKETSQVTLVHTEILKLFPQAAGQERYSSLLTYKLPVADVYPLSQTFHKLEAVKHNFNLEEYSLSQCTLEKVFLELSKEQEVGNFDEEIDTTMRWKLLPHSDEP

SEQ ID NO: 49 - protein, 556 aa, Homo sapiens [sequence omitted]

SEQ ID NO: 50 - protein, 1577 aa, Homo sapiens
MEAGSVVRAIFDFCPSVSEELPLFVGDIIEVLAVVDEFWLLGKKEDVTGQFPSSFVEIVTIPSLKEGERLFVCICEFTSQELDNLPLHRGDLVILDGIPTAGWLQGRSCWGARGFFPSSCVRELCLSSQSRQWHSQSALFQIPEYSMGQARALMGLSAQLDEELDFREGDVITIIGVPEPGWFEGELEGRRGIFPEGFVELLGPLRTVDESVSSGNQDDCIVNGEVDTPVGEEEIGPDEDEEEPGTYGVALYRFQALEPNELDFEVGDKIRILATLEDGWLEGSLKGRTGIFPYRFVKLCPDTRVEETMALPQEGSLARIPETSLDCLENTLGVEEQRHETSDHEAEEPDCIISEAPTSPLGHLTSEYDTDRNSYQDEDTAGGPPRSPGVEWEMPLATDSPTSDPTEVVNGISSQPQVPFHPNLQKSQYYSTVGGSHPHSEQYPDLLPLEARTRDYASLPPKRMYSQLKTLQKPVLPLYRGSSVSASRVVKPRQSSPQLHNLASYTKKHHTSSVYSISERLEMKPGPQAQGLVMEAATHSQGDGSTDLDSKLTQQLIEFEKSLAGPGTEPDKILRHFSIMDFNSEKDIVRGSSKLITEQELPERRKALRPPPPRPCTPVSTSPHLLVDQNLKPAPPLVVRPSRPAPLPPSAQQRTNAVSPKLLSRHRPTCETLEKEGPGHMGRSLDQTSPCPLVLVRIEEMERDLDMYSRAQEELNLMLEEKQDESSRAETLEDLKFCESNIESLNMELQQLREMTLLSSQSSSLVAPSGSVSAENPEQRMLEKRAKVIEELLQTERDYIRDLEMCIERIMVPMQQAQVPNIDFEGLFGNMQMVIKVSKQLLAALEISDAVGPVFLGHRDELEGTYKIYCQNHDEAIALLEIYEKDEKIQKHLQDSLADLKSLYNEWGCTNYINLGSFLIKPVQRVMRYPLLLMELLNSTPESHPDKVPLTNAVLAVKEINVNINEYKRRKDLVLKYRKGDEDSLMEKISKLNIHSIIKKSNRVSSHLKHLTGFAPQIKDEVFEETEKNFRMQERLIKSFIRDLSLYLQHIRESACVKVVAAVSMWDVCMERGHRDLEQFERVHRYISDQLFTNFKERTERLVISPLNQLLSMFTGPHKLVQKRFDKLLDFYNCTERAEKLKDKKTLEELQSARNNYEALNAQLLDELPKFHQYAQGLFTNCVHGYAEAHCDFVHQALEQLKPLLSLLKVAGREGNLIAIFHEEHSRVLQQLQVFTFFPESLPATKKPFERKTIDRQSARKPLLGLPSYMLQSEELRASLLARYPPEKLFQAERNFNAAQDLDVSLLEGDLVGVIKKKDPMGSQNRWLIDNGVTKGFVYSSFLKPYNPRRSHSDASVGSHSSTESEHGSSSPRFPRQNSGSTLTFNPSSMAVSFTSGSCQKQPQDASPPPKECDQGTLSASLNPSNSESSPSRCPSDPDSTSQPRSGDSADVARDVKQPTATPRSYRNFRHPEIVGYSVPGRNGQSQDLVKGCARTAQAPEDRSTEPDGSEAEGNQVYFAVYTFKARNPNELSVSANQKLKILEFKDVTGNTEWWLAEVNGKKGYVPSNYIRKTEYT

SEQ ID NO: 51 - protein, 335 aa, Homo sapiens
MWATLPLLCAGAWLLGVPVCGAAELCVNSLEKFHFKSWMSKHRKTYSTEEYHHRLQTFASNWRKINAHNNGNHTFKMALNQFSDMSFAEIKHKYLWSEPQNCSATKSNYLRGTGPYPPSVDWRKKGNFVSPVKNQGACGSCWTFSTTGALESAIAIATGKMLSLAEQQLVDCAQDFNNHGCQGGLPSQAFEYILYNKGIMGEDTYPYQGKDGYCKFQPGKAIGFVKDVANITIYDEEAMVEAVALYNPVSFAFEVTQDFMMYRTGIYSSTSCHKTPDKVNHAVLAVGYGEKNGIPYWIVKNSWGPQWGMNGYFLIERGKNMCGLAACASYPIPLV

SEQ ID NO: 52 - protein, 760 aa, Homo sapiens; identical to SEQ ID NO: 29

SEQ ID NO: 53 - protein, 227 aa, Homo sapiens
MAGVGAGPLRAMGRQALLLLALCATGAQGLYFHIGETEKRCFIEEIPDETMVIGNYRTQMWDKQKEVFLPSTPGLGMHVEVKDPDGKVVLSRQYGSEGRFTFTSHTPGDHQICLHSNSTRMALFAGGKLRVHLDIQVGEHANNYPEIAAKDKLTELQLRARQLLDQVEQIQKEQDYQRYREERFRLTSESTNQRVLWWSIAQTVILILTGIWQMRHLKSFFEAKKLV

SEQ ID NO: 54 - protein, 287 aa, Homo sapiens
MYCDNRNLKYLPFVPSRMKYVYFQNNQITSIQEGVFDNATGLLWIALHGNQITSDKVGRKVFSKLRHLERLYLDHNNLTRMPGPLPRSLRELHLDHNQISRVPNNALEGLENLTALYLQHNEIQEVGSSMRGLRSLILLDLSYNHLRKVPDGLPSALEQLYMEHNNVYTVPDSYFRGAPKLLYVRLSHNSLTNNGLASNTFNSSSLLELDLSYNQLQKIPPVNTNLENLYLQGNRINEFSISSFCTVVDVVNFSKLQVLRLDGNEIKRSAMPADAPLCLRLASLIEI

SEQ ID NO: 55 - protein, 297 aa, Homo sapiens
MTTPRNSVNGTFPAEPMKGPIAMQSGPKPLFRRMSSLVGPTQSFFMRESKTLGAVQIMNGLFHIALGGLLMIPAGIYAPICVTVWYPLWGGIMYIISGSLLAATEKNSRKCLVKGKMIMNSLSLFAAISGMILSIMDILNIKISHFLKMESLNFIRAHTPYINIYNCEPANPSEKNSPSTQYCYSIQSLFLGILSVMLIFAFFQELVIAGIVENEWKRTCSRPKSNIVLLSAEEKKEQTIEIKEEVVGLTETSSQPKNEEDIEIIPIQEEEEEETETNFPEPPQDQESSPIENDSSP

SEQ ID NO: 56 - protein, 211 aa, Homo sapiens
MAKPEQAADGGVRGRGARPPAQEAQRRRRHPVVVARDLAPGVPGSLHSTQKNMAQETNQTPGPMLCSTGCGFYGNPRTNGMCSVCYKEHLQRQQNSGRMSPMGTASGSNSPTSDSASVQRADTSLNNCEGAAGSTSEKSRNVPVAALPVTQQMTEMSISREDKITTPKTEVSEPVVTQPSPSVSQPSTSQSEEKAPELPKPKKNRCFMCRK

SEQ ID NO: 57 - protein, 706 aa, Homo sapiens
MKIFSESHKTVFVVDHCPYMAESCRQHVEFDMLVKNRTQGIIPLAPISKSLWTCSVESSMEYCRIMYDIFPFKKLVNFIVSDSGAHVLNSWTQEDQNLQELMAALAAVGPPNPRADPECCSILHGLVAAVETLCKITEYQHEARTLLMENAERVGNRGRIICITNAKSDSHVRMLEDCVQETIHEHNKLAANSDHLMQIQKCELVLIHTYPVGEDSLVSDRSKKELSPVLTSEVHSVRAGRHLATKLNILVQQHFDLASTTITNIPMKEEQHANTSANYDVELLHHKDAHVDFLKSGDSHLGGGSREGSFKETITLKWCTPRTNNIELHYCTGAYRISPVDVNSRPSSCLTNFLLNGRSVLLEQPRKSGSKVISHMLSSHGGEIFLHVLSSSRSILEDPPSISEGCGGRVTDYRITDFGEFMRENRLTPFLDPRYKIDGSLEVPLERAKDQLEKHTRYWPMIISQTTIFNMQAVVPLASVIVKESLTEEDVLNCQKTIYNLVDMERKNDPLPISTVGTRGKGPKRDEQYRIMWNELETLVRAHINNSEKHQRVLECLMACRSKPPEEEERKKRGRKREDKEDKSEKAVKDYEQEKSWQDSERLKGILERGKEELAEAEIIKDSPDSPEPPNKKPLVEMDETPQVEKSKGPVSLLSLWSNRINTANSRKHQEFAGRLNSVNNRAELYQHLKEENGMETTENGKASRQ

SEQ ID NO: 58 - protein, 3014 aa, Homo sapiens
MAPPPPPVLPVLLLLAAAAALPAMGLRAAAWEPRVPGGTRAFALRPGCTYAVGAACTPRAPRELLDVGRDGRLAGRRRVSGAGRPLPLQVRLVARSAPTALSRRLRARTHLPGCGARARLCGTGARLCGALCFPVPGGCAAAQHSALAAPTTLPACRCPPRPRPRCPGRPICLPPGGSVRLRLLCALRRAAGAVRVGLALEAATAGTPSASPSPSPPLPPNLPEARAGPARRARRGTSGRGSLKFPMPNYQVALFENEPAGTLILQLHAHYTIEGEEERVSYYMEGLFDERSRGYFRIDSATGAVSTDSVLDRETKETHVLRVKAVDYSTPPRSATTYITVLVKDTNDHSPVFEQSEYRERVRENLEVGYEVLTIRASDRDSPINANLRYRVLGGAWDVFQLNESSGVVSTRAVLDREEAAEYQLLVEANDQGRNPGPLSATATVYIEVEDENDNYPQFSEQNYVVQVPEDVGLNTAVLRVQATDRDQGQNAAIHYSILSGNVAGQFYLHSLSGILDVINPLDFEDVQKYSLSIKAQDGGRPPLINSSGVVSVQVLDVNDNEPIFVSSPFQATVLENVPLGYPVVHIQAVDADSGENARLHYRLVDTASTFLGGGSAGPKNPAPTPDFPFQIHNSSGWITVCAELDREEVEHYSFGVEAVDHGSPPMSSSTSVSITVLDVNDNDPVFTQPTYELRLNEDAAVGSSVLTLQARDRDANSVITYQLTGGNTRNRFALSSQRGGGLITLALPLDYKQEQQYVLAVTASDGTRSHTAHVLINVTDANTHRPVFQSSHYTVSVSEDRPVGTSIATLSANDEDTGENARITYVIQDPVPQFRIDPDSGTMYTMMELDYENQVAYTLTIMAQDNGIPQKSDTTTLEILILDANDNAPQFLWDFYQGSIFEDAPPSTSILQVSATDRDSGPNGRLLYTFQGGDDGDGDFYIEPTSGVIRTQRRLDRENVAVYNLWALAVDRGSPTPLSASVEIQVTILDINDNAPMFEKDELELFVEENNPVGSVVAKIRANDPDEGPNAQIMYQIVEGDMRHFFQLDLLNGDLRAMVELDFEVRREYVLVVQATSAPLVSRATVHILLVDQNDNPPVLPDFQILFNNYVTNKSNSFPTGVIGCIPAHDPDVSDSLNYTFVQGNELRLLLLDPATGELQLSRDLDNNRPLEALMEVSVSDGIHSVTAFCTLRVTIITDDMLTNSITVRLENMSQEKFLSPLLALFVEGVAAVLSTTKDDVFVFNVQNDTDVSSNILNVTFSALLPGGVRGQFFPSEDLQEQIYLNRTLLTTISTQRVLPFDDNICLREPCENYMKCVSVLRFDSSAPFLSSTTVLFRPIHPINGLRCRCPPGFTGDYCETEIDLCYSDPCGANGRCRSREGGYTCECFEDFTGEHCEVDARSGRCANGVCKNGGTCVNLLIGGFHCVCPPGEYERPYCEVTTRSFPPQSFVTFRGLRQRFHFTISLTFATQERNGLLLYNGRFNEKHDFIALEIVDEQVQLTFSAGETTTTVAPKVPSGVSDGRWHSVQVQYYNKPNIGHLGLPHGPSGEKMAVVTVDDCDTTMAVRFGKDIGNYSCAAQGTQTGSKKSLDLTGPLLLGGVPNLPEDFPVHNRQFVGCMRNLSVDGKNVDMAGFIANNGTREGCAARRNFCDGRRCQNGGTCVNRWNMYLCECPLRFGGKNCEQAMPHPQLFSGESVVSWSDLNIIISVPWYLGLMFRTRKEDSVLMEATSGGPTSFRLQILNNYLQFEVSHGPSDVESVMLSGLRVTDGEWHHLLIELKNVKEDSEMKHLVTMTLDYGMDQNKADIGGMLPGLTVRSVVVGGASEDKVSVRRGFRGCMQGVRMGGTPTNVATLNMNNALKVRVKDGCDVDDPCTSSPCPPNSRCHDAWEDYSCVCDKGYLGINCVDACHLNPCENMGACVRSPGSPQGYVCECGPSHYGPYCENKLDLPCPRGWWGNPVCGPCHCAVSKGFDPDCNKTNGQCQCKENYYKLLAQDTCLPCDCFPHGSHSRTCDMATGQCACKPGVIGRQCNRCDNPFAEVTTLGCEVIYNGCPKAFEAGIWWPQTKFGQPAAVPCPKGSVGNAVRHCSGEKGWLPPELFNCTTISFVDLRAMNEKLSRNETQVDGARALQLVRALRSATQHTGTLFGNDVRTAYQLLGHVLQHESWQQGFDLAATQDADFHEDVIHSGSALLAPATRAAWEQIQRSEGGTAQLLRRLEGYFSNVARNVRRTYLRPFVIVTANMILAVDIFDKFNFTGARVPRFDTIHEEFPRELESSVSFPADFFRPPEEKEGPLLRPAGRRTTPQTTRPGPGTEREAPISRRRRHPDDAGQFAVALVIIYRTLGQLLPERYDPDRRSLRLPHRPIINTPMVSTLVYSEGAPLPRPLERPVLVEFALLEVEERTKPVCVFWNHSLAVGGTGGWSARGCELLSRNRTHVACQCSHTASFAVLMDISRRENGEVLPLKIVTYAAVSLSLAALLVAFVLLSLVRMLRSNLHSIHKHLAVALFLSQLVFVIGINQTENPFLCTVVAILLHYIYMSTFAWTLVESLHVYRMLTEVRNIDTGPMRFYYVVGWGIPAIVTGLAVGLDPQGYGNPDFCWLSLQDTLIWSFAGPIGAVIIINTVTSVLSAKVSCQRKHHYYGKKGIVSLLRTAFLLLLLISATWLLGLLAVNRDALSFHYLFAIFSGLQGPFVLLFHCVLNQEVRKHLKGVLGGRKLHLEDSATTRATLLTRSLNCNTTFGDGPDMLRTDLGESTASLDSIVRDEGIQKLGVSSGLVRGSHGEPDASLMPRSCKDPPGHDSDSDSELSLDEQSSSYASSHSSDSEDDGVGAEEKWDPARGAVHSTPKGDAVANHVPAGWPDQSLAESDSEDPSGKPRLKVETKVSVELHREEQGSHRGEYPPDQESGGAARLASSQPPEQRKGILKNKVTYPPPLTLTEQTLKGRLREKLADCEQSPTSSRTSSLGSGGPDCAITVKSPGREPGRDHLNGVAMNVRTGSAQADGSDSEKP

SEQ ID NO: 59 - protein, 509 aa, Homo sapiens; identical to SEQ ID NO: 41

SEQ ID NO: 60 - protein, 406 aa, Homo sapiens
IEADLGYPGGKARIIHKESDIITAFAVNKANRNCIAIASSHDVQELDVSGILATQIYTWVDDDAEMETKGSEDFLVIHARDDLTAVQGTTPYTHSNPGTPINMPWLGSTQTGRGASVMIKKAINNVRRMTSHPTLPYYLTGAQDGSVRMFEWGHSQQITCFRSGGNSRVTRMRFNYQGNKFGIVDADGYLSLYQTNWKCCPVTGSMPKPYLTWQCHNKTANDFVFVSSSSLIATAGLSTDNRNICLWDTLVAPANSLVHAFTCHDSGATVLAYAPKHQLLISGGRKGFTCAFDLRQRQQRQLFQSHDSPVKAIAIDPTEEYFVTGSAEGNIKIWSLSTFSLLHTFINEHARQSIFRNIGTGVMQIETGPANHIFSCGADGTMKMRILPDQFSPLNEVLRNDVKFML

SEQ ID NO: 61 - protein, 142 aa, Homo sapiens
MGAPTLPPAWQPFLKDHRISTFKNWPFLEGCACTPERMAEAGFIHCPTENEPDLAQCFFCFKELEGWEPDDDPIEEHKKHSSGCAFLSVKKQFEELTLGEFLKLDRERAKNKIAKETNNKKKEFEETAKKVRRAIEQLAAMD

SEQ ID NO: 62 - protein, 72 aa, Homo sapiens; identical to SEQ ID NO: 46

SEQ ID NO: 63 - protein, 556 aa, Homo sapiens [sequence omitted]

SEQ ID NO: 64 - protein, 825 aa, Homo sapiens
MGWLCSGLLFPVSCLVLLQVASSGNMKVLQEPTCVSDYMSISTCEWKMNGPTNCSTELRLLYQLVFLLSEAHTCIPENNGGAGCVCHLLMDDVVSADNYTLDLWAGQQLLWKGSFKPSEHVKPRAPGNLTVHTNVSDTLLLTWSNPYPPDNYLYNHLTYAVNIWSENDPADFRIYNVTYLEPSLRIAASTLKSGISYRARVRAWAQCYNTTWSEWSPSTKWHNSYREPFEQHLLLGVSVSCIVILAVCLLCYVSITKIKKEWWDQIPNPARSRLVAIIIQDAQGSQWEKRSRGQEPAKCPHWKNCLTKLLPCFLEHNMKRDEDPHKAAKEMPFQGSGKSAWCPVEISKTVLWPESISVVRCVELFEAPVECEEEEEVEEEKGSFCASPESSRDDFQEGREGIVARLTESLFLDLLGEENGGFCQQDMGESCLLPPSGSTSAHMPWDEFPSAGPKEAPPWGKEQPLHLEPSPPASPTQSPDNLTCTETPLVIAGNPAYRSFSNSLSQSPCPRELGPDPLLARHLEEVEPEMPCVPQLSEPTTVPQPEPETWEQILRRNVLQHGAAAAPVSAPTSGYQEFVHAVEQGGTQASAVVGLGPPGEAGYKAFSSLLASSAVSPEKCGFGASSGEEGYKPFQDLIPGCPGDPAPVPVPLFTFGLDREPPRSPQSSHLPSSSPEHLGLEPGEKVEDMPKPPLPQEQATDPLVDSLGSGIVYSALTCHLCGHLKQCHGQEDGGQTPVMASPCCGCCCGDRSSPPTTPLRAPDPSPGGVPLEASLCPASLAPSGISEKSKSSSSFHPAPGNAQSSSQTPKIVNFVSVGPTYMRVS

SEQ ID NO: 65 - protein, 303 aa, Homo sapiens; identical to SEQ ID NO: 13

SEQ ID NO: 66 - protein, 773 aa, Homo sapiens
MKMRGEKRRDKVNPKSSQRKLNWIPSFPTYDYFNQVTLQLLDGFMITLSTDGVIICVAENISSLLGHLPAEIVGKKLLSLLPDEEKDEVYQKIILKFPLLNSETHIEFCCHLKRGNVEHGDSSAYENVKFIVNVRDICNEFPVVFSGLFSSHLCADFAACVPQEDRLYLVGNVCILRTQLLQQLYTSKAVSDEAVLTQDSDEEPFVGELSSSQGQRGHTSMKAVYVEPAAAAAAAAISDDQIDIAEVEQYGPQENVHMFVDSDSTYCSSTVFLDTMPESPALSLQDFRGEPEVNPLYRADPVDLEFSVDQVDSVDQEGPMDQQDPENPVAPLDQAGLMDPVDPEDSVDLGAAGASAQPLQPSSPVAYDIISQELELMKKLKEQLEERTWLLHDAIQNQQNALELMMDHLQKQPNTLRHVVIPDLQSSEAVPKKQQKQHAGQVKRPLPHPKDVKCFCGLSLSNSLKNTGELQEPCVAFNQQQLVQQEQHLKEQQRQLREQLQQLREQRKVQKQKKMQEKKKLQEQKMQEKKKLQEQRRQKKKKLQERKKWQGQMLQKEPEEEQQKQQLQEQPLKHNVIVGNERVQICLQNPRDVSVPLCNHPVRFLQAQPIVPVQRAAEQQPSGFYQDENCGQQEDESQSFYPEAYQGPPVNQLPLIDTSNSEAISSSSIPQFPITSDSTISTLETPQDYIRLWQELSDSLGPVVQVNTWSCDEQGTLHGQPTYHQVQVSEVGVEGPPDPQAFQGPAAYQPDQMRSAEQTRLMPAEQRDSNKPC

SEQ ID NO: 67 - protein, 1255 aa, Homo sapiens
MTPGTQSPFFLLLLLTVLTVVTGSGHASSTPGGEKETSATQRSSVPSSTEKNAVSMTSSVLSSHSPGSGSSTTQGQDVTLAPATEPASGSAATWGQDVTSVPVTRPALGSTTPPAHDVTSAPDNKPAPGSTAPPAHGVTSAPDTRPAPGSTAPPAHGVTSAPDTRPAPGSTAPPAHGVTSAPDTRPAPGSTAPPAHGVTSAPDTRPAPGSTAPPAHGVTSAPDTRPAPGSTAPPAHGVTSAPDTRPAPGSTAPPAHGVTSAPDTRPAPGSTAPPAHGVTSAPDTRPAPGSTAPPAHGVTSAPDTRPAPGSTAPPAHGVTSAPDTRPAPGSTAPPAHGVTSAPDTRPAPGSTAPPAHGVTSAPDTRPAPGSTAPPAHGVTSAPDTRPAPGSTAPPAHGVTSAPDTRPAPGSTAPPAHGVTSAPDTRPAPGSTAPPAHGVTSAPDTRPAPGSTAPPAHGVTSAPDTRPAPGSTAPPAHGVTSAPDTRPAPGSTAPPAHGVTSAPDTRPAPGSTAPPAHGVTSAPDTRPAPGSTAPPAHGVTSAPDTRPAPGSTAPPAHGVTSAPDTRPAPGSTAPPAHGVTSAPDTRPAPGSTAPPAHGVTSAPDTRPAPGSTAPPAHGVTSAPDTRPAPGSTAPPAHGVTSAPDTRPAPGSTAPPAHGVTSAPDTRPAPGSTAPPAHGVTSAPDTRPAPGSTAPPAHGVTSAPDTRPAPGSTAPPAHGVTSAPDTRPAPGSTAPPAHGVTSAPDTRPAPGSTAPPAHGVTSAPDTRPAPGSTAPPAHGVTSAPDTRPAPGSTAPPAHGVTSAPDTRPAPGSTAPPAHGVTSAPDTRPAPGSTAPPAHGVTSAPDTRPAPGSTAPPAHGVTSAPDTRPAPGSTAPPAHGVTSAPDTRPAPGSTAPPAHGVTSAPDTRPAPGSTAPPAHGVTSAPDTRPAPGSTAPPAHGVTSAPDNRPALGSTAPPVHNVTSASGSASGSASTLVHNGTSARATTTPASKSTPFSIPSHHSDTPTTLASHSTKTDASSTHHSSVPPLTSSNHSTSPQLSTGVSFFFLSFHISNLQFNSSLEDPSTDYYQELQRDISEMFLQIYKQGGFLGLSNIKFRPGSVVVQLTLAFREGTINVHDVETQFNQYKTEAASRYNLTISDVSVSDVPFPFSAQSGAGVPGWGIALLVLVCVLVALAIVYLIALAVCQCRRKNYGQLDIFPARDTYHPMSEYPTYHTHGRYVPPSSTDRSPYEKVSAGNGGSSLSYTNPAVAATSANL

SEQ ID NO: 68 - protein, 937 aa, Homo sapiens
MHRPRRRGTRPPLLALLAALLLAARGAAAQETELSVSAELVPTSSWNISSELNKDSYLTLDEPMNNITTSLGQTAELHCKVSGNPPPTIRWFKNDAPVVQEPRRLSFRSTIYGSRLRIRNLDTTDTGYFQCVATNGKEVVSSTGVLFVKFGPPPTASPGYSDEYEEDGFCQPYRGIACARFIGNRTVYMESLHMQGEIENQITAAFTMIGTSSHLSDKCSQFAIPSLCHYAFPYCDETSSVPKPRDLCRDECEILENVLCQTEYIFARSNPMILMRLKLPNCEDLPQPESPEAANCIRIGIPMADPINKNHKCYNSTGVDYRGTVSVTKSGRQCQPWNSQYPHTHTFTALRFPELNGGHSYCRNPGNQKEAPWCFTLDENFKSDLCDIPACDSKDSKEKNKMEILYILVPSVAIPLAIALLFFFICVCRNNQKSSSAPVQRQPKHVRGQNVEMSMLNAYKPKSKAKELPLSAVRFMEELGECAFGKIYKGHLYLPGMDHAQLVAIKTLKDYNNPQQWTEFQQEASLMAELHHPNIVCLLGAVTQEQPVCMLFEYINQGDLHEFLIMRSPHSDVGCSSDEDGTVKSSLDHGDFLHIAIQIAAGMEYLSSHFFVHKDLAARNILIGEQLHVKISDLGLSREIYSADYYRVQSKSLLPIRWMPPEAIMYGKFSSDSDIWSFGVVLWEIFSFGLQPYYGFSNQEVIEMVRKRQLLPCSEDCPPRMYSLMTECWNEIPSRRPRFKDIHVRLRSWEGLSSHTSSTTPSGGNATTQTTSLSASPVSNLSNPRYPNYMFPSQGITPQGQIAGFIGPPIPQNQRFIPINGYPIPPGYAAFPAAHYQPTGPPRVIQHCPPPKSRSPSSASGSTSTGHVTSLPSSGSNQEANIPLLPHMSIPNHPGGMGITVFGNKSQKPYKIDSKQASLLGDANIHGHTESMISAEL

SEQ ID NO: 69 - protein, 106 aa, Homo sapiens
MHGPRETLQEIVLHLEPQNELDPVDLLCYEQLSESEEENDEADGVSHAQLPARRAEPQRHKILCVCCKCDGRIELTVESSAEDLRTLQQLFLSTLSFVCPWCATNQ

SEQ ID NO: 70 - protein, 979 aa, Homo sapiens
MELAALCRWGLLLALLPPGAASTQDNYLSTDVGSCTLVCPLHNQEVTAEDGTQRCEKCSKPCARVCYGLGMEHLREVRAVTSANIQEFAGCKKIFGSLAFLPESFDGDPASNTAPLQPEQLQVFETLEEITGYLYISAWPDSLPDLSVFQNLQVIRGRILHNGAYSLTLQGLGISWLGLRSLRELGSGLALIHHNTHLCFVHTVPWDQLFRNPHQALLHTANRPEDECVGEGLACHQLCARGHCWGPGPTQCVNCSQFLRGQECVEECRVLQGLPREYVNARHCLPCHPECQPQNGSVTCFGPEADQCVACAHYKDPPFCVARCPSGVKPDLSYMPIWKFPDEEGACQPCPINCTHSCVDLDDKGCPAEQRASPLTSIISAVVGILLVVVLGVVFGILIKRRQQKIRKYTMRRLLQETELVEPLTPSGAMPNQAQMRILKETELRKVKVLGSGAFGTVYKGIWIPDGENVKIPVAIKVLRENTSPKANKEILDEAYVMAGVGSPYVSRLLGICLTSTVQLVTQLMPYGCLLDHVRENRGRLGSQDLLNWCMQIAKGMSYLEDVRLVHRDLAARNVLVKSPNHVKITDFGLARLLDIDETEYHADGGKVPIKWMALESILRRRFTHQSDVWSYGVTVWELMTFGAKPYDGIPAREIPDLLEKGERLPQPPICTIDVYMIMVKCWMIDSECRPRFRELVSEFSRMARDPQRFVVIQNEDLGPASPLDSTFYRSLLEDDDMGDLVDAEEYLVPQQGFFCPDPAPGAGGMVHHRHRSSSTRSGGGDLTLGLEPSEEEAPRSPLAPSEGAGSDVFDGDLGMGAAKGLQSLPTHDPSPLQRYSEDPTVPLPSETDGYVAPLTCSPQPEYVNQPDVRPQPPSPREGPLPAARPAGATLERPKTLSPGKNGVVKDVFAFGGAVENPEYLTPQGGAAPQPHPPPAFSPAFDNLYYWDQDPPERGAPPSTFKGTPTAENPEYLGLDVPV

SEQ ID NO: 71 - protein, 269 aa, Homo sapiens
MSKVIKKRVETSPRPTASSDSLQTCAGVIEYAKSISKSNAKCIEYVTLNASQYANCSSISIKLTDSLSSQMTSTFIMLEGETKLYKNKSKQDRSDGYFLKIKVTAASPMLYQLLEAVYGNIKHKERIPNSLHSLSVETITEKTFKDESIFINKLNGAMVEYVSAGESSILRSIEGELESLSKRERQLAKAIITPIVFYRSGTETKITFALKKLIIDREVVANVIGLSGDSERVSMTENVEEDLARNLGLVDIDDEYDEDSDKEKPIFNV

SEQ ID NO: 72 - protein, 580 aa, Homo sapiens
MAGTVRTACLVVAMLLSLDFPGQAQPPPPPPDATCHQVRSFFQRLQPGLKWVPETPVPGSDLQVCLPKGPTCCSRKMEEKYQLTARLNMEQLLQSASMELKFLIIQNAAVFQEAFEIVVRHAKNYTNAMFKNNYPSLTPQAFEFVGEFFTDVSLYILGSDINVDDMVNELFDSLFPVIYTQLMNPGLPDSALDINECLRGARRDLKVFGNFPKLIMTQVSKSLQVTRIFLQALNLGIEVINTTDHLKFSKDCGRMLTRMWYCSYCQGLMMVKPCGGYCNVVMQGCMAGVVEIDKYWREYILSLEELVNGMYRIYDMENVLLGLFSTIHDSIQYVQKNAGKLTTTIGKLCAHSQQRQYRSAYYPEDLFIDKKVLKVAHVEHEETLSSRRRELIQKLKSFISFYSALPGYICSHSPVAENDTLCWNGQELVERYSQKAARNGMKNQFNLHELKMKGPEPVVSQIIDKLKHINQLLRTMSMPKGRVLDKNLDEEGFESGDCGDDEDECIGGSGDGMIKVKNQLRFLAELAYDLDVDDAPGNSQQATPKDNEISTFHNLGNVHSPLKLLTSMAISVVCFFFLVH

SEQ ID NO: 73 - protein, 2000 aa, Homo sapiens
MKAADTVILWARSKNDQLRISFPPGLCWGDRMPDKDDIRLLPSALGVKKRKRGPKKQKENKPGKPRKRKKRDSEEEFGSERDEYREKSESGGSEYGTGPGRKRRRKHREKKEKKTKRRKKGEGDGGQKQVEQKSSATLLLTWGLEDVEHVFSEEDYHTLTNYKAFSQFMRPLIAKKNPKIPMSKMMTILGAKWREFSANNPFKGSAAAVAAAAAAAAAAVAEQVSAAVSSATPIAPSGPPALPPPPAADIQPPPIRRAKTKEGKGPGHKRRSKSPRVPDGRKKLRGKKMAPLKIKLGLLGGKRKKGGSYVFQSDEGPEPEAEESDLDSGSVHSASGRPDGPVRTKKLKRGRPGRKKKKVLGCPAVAGEEEVDGYETDHQDYCEVCQQGGEIILCDTCPRAYHLVCLDPELDRAPEGKWSCPHCEKEGVQWEAKEEEEEYEEEGEEEGEKEEEDDHMEYCRVCKDGGELLCCDACISSYHIHCLNPPLPDIPNGEWLCPRCTCPVLKGRVQKILHWRWGEPPVAVPAPQQADGNPDVPPPRPLQGRSEREFFVKWVGLSYWHCSWAKELQLEIFHLVMYRNYQRKNDMDEPPPLDYGSGEDDGKSDKRKVKDPHYAEMEEKYYRFGIKPEWMTVHRIINHSVDKKGNYHYLVKWRDLPYDQSTWEEDEMNIPEYEEHKQSYWRHRELIMGEDPAQPRKYKKKKKELQGDGPPSSPTNDPTVKYETQPRFITATGGTLHMYQLEGLNWLRFSWAQGTDTILADEMGLGKTIQTIVFLYSLYKEGHTKGPFLVSAPLSTIINWEREFQMWAPKFYVVTYTGDKDSRAIIRENEFSFEDNAIKGGKKAFKMKREAQVKFHVLLTSYELITIDQAALGSIRWACLVVDEAHRLKNNQSKFFRVLNGYKIDHKLLLTGTPLQNNLEELFHLLNFLTPERFNNLEGFLEEFADISKEDQIKKLHDLLGPHMLRRLKADVFKNMPAKTELIVRVELSPMQKKYYKYILTRNFEALNSRGGGNQVSLLNIMMDLKKCCNHPYLFPVAAMESPKLPSGAYEGGALIKSSGKLMLLQKMLRKLKEQGHRVLIFSQMTKMLDLLEDFLDYEGYKYERIDGGITGALRQEAIDRFNAPGAQQFCFLLSTRAGGLGINLATADTVIIFDSDWNPHNDIQAFSRAHRIGQANKVMIYRFVTRASVEERITQVAKRKMMLTHLVVRPGLGSKAGSMSKQELDDILKFGTEELFKDENEGENKEEDSSVIHYDNEAIARLLDRNQDATEDTDVQNMNEYLSSFKVAQYVVREEDKIEEIEREIIKQEENVDPDYWEKLLRHHYEQQQEDLARNLGKGKRVRKQVNYNDAAQEDQDNQSEYSVGSEEEDEDFDERPEGRRQSKRQLRNEKDKPLPPLLARVGGNIEVLGFNTRQRKAFLNAVMRWGMPPQDAFTTQWLVRDLRGKTEKEFKAYVSLFMRHLCEPGADGSETFADGVPREGLSRQQVLTRIGVMSLVKKKVQEFEHINGRWSMPELMPDPSADSKRSSRASSPTKTSPTTPEASATNSPCTSKPATPAPSEKGEGIRTPLEKEEAENQEEKPEKNSRIGEKMETEADAPSPAPSLGERLEPRKIPLEDEVPGVPGEMEPEPGYRGDREKSATESTPGERGEEKPLDGQEHRERPEGETGDLGKREDVKGDRELRPGPRDEPRSNGRREEKTEKPRFMFNIADGGFTELHTLWQNEERAAISSGKLNEIWHRRHDYWLLAGIVLHGYARWQDIQNDAQFAIINEPFKTEANKGNFLEMKNKFLARRFKLLEQALVIEEQLRRAAYLNLSQEPAHPAMALHARFAEAECLAESHQHLSKESLAGNKPANAVLHKVLNQLEELLSDMKADVTRLPATLSRIPPIAARLQMSERSILSRLASKGTEPHPTPAYPPGPYATPPGYGAAFSAAPVGALAAAGANYSQMPAGSFITAATNGPPVLVKKEKEMVGALVSDGLDRKEPRAGEVICIDD

SEQ ID NO: 74 - protein, 2218 aa, Homo sapiens
MEEDIACVKDLVSKYLVDNERLSRQKLAFLVQTEPRMLLMEGLKLLSLCIEVDSCNANGCEHNSEDKSVERILHDHGILTPSLCLWYPDGYKLTGNVLILLECFVRSSPANFEQKYIEDFKKLEQLKEDLKSVDINLIPLIDGRTSFYNEQIPDWVNDKLRDTLFSLLKYAQESNSLFEESEYSRLCESLFMTSGRLSGVESLNVLMDNRSNHYEEVIASCHQGINNKLTAHEVKLQIEEEYQVFRNRLRKGEIEGQFLKVDKSQLLNELNNLYADKVVAEDNIEHLIYQFKRASPILRFLYANVDEGNEKRGNQTIGECQVQCWRSFLNKVKSLRILNTRRKLLLIFDALILLASKHDLMKQKCLKGWLGSCFLRVKDRLVSLEATKRDLEKWGERGNRLRSRITQSSQCLSKNQILNSIFQKTILKATTALKDVGISVDHYKIDMEVICLNSYDLIMDFDVSGVVPTISYQRTEEETFPYVMGDVELLGTTDLERLSSLSLALVNSMKTSSTVKLRQNEFGPARYQVVRCKEAYCQEFSLGNTELQLIYQKTGECSKCYAINDNKVGEVCSFYADPKRYFPAIFSAEVLQTTISTMISWIEDCNELEGQLNNIRSLTKMILVLILAHPSKRSQKLLQNLRYFVMAYLSDYHHKDLIDKIREELITDVEFLLYRLIRTLMNLVLSEDVKSMMTNRFKFILNVSYMCHFITKETPDRLTDQIKCFEKFLEPKVRFGHVSTNPADTATEEELDDMVYNAKKFLSKDGCTTIEGPDYKRPGVSKKYLSLLTSSFNNGSLFKEREVKREIKDPLITSGSAALDLASKKSVVVNKYTDGSRILNYDFNKLTALAVSQLTEVFSRKGKYLLNKQDYEYKVQQAMSNLVLGSGQLKSDADGADLDEILLDGGASDYFDQLKETVEKIVDQYREPVKLGSGPNGDGQPSINDLDEIVSNKFYIRLIKGELSNHMVEEFDHDILPGKFYEEFCNAVYENSRLKQKYFYCGHMSQCPIGELTKAVSTRTYFNHEYFQCFKSILLIMNANTLMGRYTHYKSRNLNFKFDMGKLSDDVRISERESNSEALSKALSLTNCTTAMLKNLCFYSQESPQSYDSVGPDTGRLKFSLSYKEQVGGNRELYIGDLRTKMFTRLIEDYFEAISLQLSGSCLNNEKEFENAILSMKLNVSLAHVSYSMDHSKWGPMMCPFLFLTVLQNLIFLSKDLQADIKGRDYLSTLLMWHMHKMVEIPFNVVTAMMKSFIKAQLGLRKKTKQSITEDFFYSNFQAGVVPSHISSILDMGQGILHNTSDFYALISERFINYAISCICGGTIDAYTSSDDQISLFDQSLTELLQRDPEEFRTLIEFHYYMSDQLNKFVSPKSVIGRFVAEFKSRFFVWGDEVPLLTKFVAAALHNIKCKEPHQLAETIDTIIDQSVANGVPVHLCNLIQKRTLNPLQYARYPIDPFLLNCETDVRDWVDGNRSYRIMRQIEGLIPNACSKIRSMLRKLYNRLKTGQLHEEFTTNYLSSEHLSSLRNLCELLDVEPPSESDLEYSWLNLAAHHPLRMVLRQKIIYSGAVNLDDEKIPTIVKTIQNKLSSTFTRGAQKLLSEAINKSAFQSSIASGFVGLCRTLGSKCVRGPNKENLYIKSIQSLISDVKGIKLLTNSNGIQYWQVPLELRNGSGGESVVSYFRPLLWDYMCISLSTAIELGAWVLGEPKTVKVFDFFKHNPCDYFPLKPTASKLLEDRVGLNHIIHSLRRLYPSVFEKHILPFMSDLASTKMKWSPRIKFLDLCVALDVNCEALSLVSHIVKWKREEHYIVLSSELRLSHSRTHEPMVEERVVSTSDAVDNFMRQIYFESYVRPFVATTRTLGSFTWFPHKTSVPEGEGLHRMGPFSSFVEKVIHKGVERPMFKHDLMMGYAWIDFDIEPARFNQNQLIASGLVDPKFDSLEDFFDAVASLPPGSAKLSQTVRFRVKSQDASFKESFAIHLEYTGSMNQQAKYLVHDVTVMYSGAVSPCVLSDCWRLVLSGPTFKGKSAWYVDTEIINEFLIDTNQLGHVTPVEIVVDMERLQFTEYDFVLVGPCTEPTPLVVHRGGLWECGKKLASFTPVIQDQDLEIFVREVGDTSSDLLIGALSDMMIDRLGLRMQWSGVDIVSTLRAAAPSCEGILSAVLEAVDNWVEFKGYALCYSKSRGKVMVQSSGGKLRLKGRTCEELTRKDECIEDIE

SEQ ID NO: 75 - protein, 485 aa, Homo sapiens
MALPPFFGQGRPGPPPPQPPPPAPFGCPPPPLPSPAFPPPLPQRPGPFPGASAPFLQPPLALQPRASAEASRGGGGAGAFYPVPPPPLPPPPPQCRPFPGTDAGERPRPPPPGPGPPWSPRWPEAPPPPADVLGDAALQRLRDRQWLEAVFGTPRRAGCPVPQRTHAGPSLGEVRARLLRALRLVRRLRGLSQALREAEADGAAWVLLYSQTAPLRAELAERLQPLTQAAYVGEARRRLERVRRRRLRLRERAREREAEREAEAARAVEREQEIDRWRVKCVQEVEEKKREQELKAAADGVLSEVRKKQADTKRMVDILRALEKLRKLRKEAAARKGVCPPASADETFTHHLQRLRKLIKKRSELYEAEERALRVMLEGEQEEERKRELEKKQRKEKEKILLQKREIESKLFGDPDEFPLAHLLEPFRQYYLQAEHSLPALIQIRHDWDQYLVPSDHPKGNFVPQGWVLPPLPSNDIWATAVKLH

SEQ ID NO: 76 - protein, 269 aa, Homo sapiens
MAEVPELASEMMAYYSGNEDDLFFEADGPKQMKCSFQDLDLCPLDGGIQLRISDHHYSKGFRQAASVVVAMDKLRKMLVPCPQTFQENDLSTFFPFIFEEEPIFFDTWDNEAYVHDAPVRSLNCTLRDSQQKSLVMSGPYELKALHLQGQDMEQQVVFSMSFVQGEESNDKIPVALGLKEKNLYLSCVLKDDKPTLQLESVDPKNYPKKKMEKRFVFNKIEINNKLEFESAQFPNWYISTSQAENMPVFLGGTKGGQDITDFTMQFVSS

SEQ ID NO: 77 - protein, 591 aa, Homo sapiens
MSEQSICQARAAVMVYDDANKKWVPAGGSTGFSRVHIYHHTGNNTFRVVGRKIQDHQVVINCAIPKGLKYNQATQTFHQWRDARQVYGLNFGSKEDANVFASAMMHALEVLNSQETGPTLPRQNSQLPAQVQNGPSQEELEIQRRQLQEQQRQKELERERLERERMERERLERERLERERLERERLEQEQLERERQERERQERLERQERLERQERLERQERLDRERQERQERERLERLERERQERERQEQLEREQLEWERERRISSAAAPASVETPLNSVLGDSSASEPGLQAASQPAETPSQQGIVLGPLAPPPPPPLPPGPAQASVALPPPPGPPPPPPLPSTGPPPPPPPPPLPNQVPPPPPPPPAPPLPASGFFLASMSEDNRPLTGLAAAIAGAKLRKVSRMEDTSFPSGGNAIGVNSASSKTDTGRGNGPLPLGGSGLMEEMSALLARRRRIAEKGSTIETEQKEDKGEDSEPVTSKASSTSTPEPTRKPWERTNTMNGSKSPVISRRDSPRKNQIVFDNRSYDSLHRPKSTPLSQPSANGVQTEGLDYDRLKQDILDEMRKELTKLKEELIDAIRQELSKSNTA

SEQ ID NO: 78 - protein, 603 aa, Homo sapiens
MASASTSKYNSHSLENESIKRTSRDGVNRDLTEAVPRLPGETLITDKEVIYICPFNGPIKGRVYITNYRLYLRSLETDSSLILDVPLGVISRIEKMGGATSRGENSYGLDITCKDMRNLRFALKQEGHSRRDMFEILTRYAFPLAHSLPLFAFLNEEKFNVDGWTVYNPVEEYRRQGLPNHHWRITFINKCYELCDTYPALLVVPYRASDDDLRRVATFRSRNRIPVLSWIHPENKTVIVRCSQPLVGMSGKRNKDDEKYLDVIRETNKQISKLTIYDARPSVNAVANKATGGGYESDDAYHNAELFFLDIHNIHVMRESLKKVKDIVYPNVEESHWLSSLESTHWLEHIKLVLTGAIQVADKVSSGKSSVLVHCSDGWDRTAQLTSLAMLMLDSFYRSIEGFEILVQKEWISFGHKFASRIGHGDKNHTDADRSPIFLQFIDCVWQMSKQFPTAFEFNEQFLIIILDHLYSCRFGTFLFNCESARERQKVTERTVSLWSLINSNKEKFKNPFYTKEINRVLYPVASMRHLELWVNYYIRWNPRIKQQQPNPVEQRYMELLALRDEYIKRLEELQLANSAKLSDPPTSPSSPSQMMPHVQTHF

SEQ ID NO: 79 - protein, 683 aa, Homo sapiens
MAALLLLPLLLLLPLLLLKLHLWPQLRWLPADLAFAVRALCCKRALRARALAAAAADPEGPEGGCSLAWRLAELAQQRAAHTFLIHGSRRFSYSEAERESNRAARAFLRALGWDWGPDGGDSGEGSAGEGERAAPGAGDAAAGSGAEFAGGDGAARGGGAAAPLSPGATVALLLPAGPEFLWLWFGLAKAGLRTAFVPTALRRGPLLHCLRSCGARALVLAPEFLESLEPDLPALRAMGLHLWAAGPGTHPAGISDLLAEVSAEVDGPVPGYLSSPQSITDTCLYIFTSGTTGLPKAARISHLKILQCQGFYQLCGVHQEDVIYLALPLYHMSGSLLGIVGCMGIGATVVLKSKFSAGQFWEDCQQHRVTVFQYIGELCRYLVNQPPSKAERGHKVRLAVGSGLRPDTWERFVRRFGPLQVLETYGLTEGNVATINYTGQRGAVGRASWLYKHIFPFSLIRYDVTTGEPIRDPQGHCMATSPGEPGLLVAPVSQQSPFLGYAGGPELAQGKLLKDVFRPGDVFFNTGDLLVCDDQGFLRFHDRTGDTFRWKGENVATTEVAEVFEALDFLQEVNVYGVTVPGHEGRAGMAALVLRPPHALDLMQLYTHVSENLPPYARPRFLRLQESLATTETFKQQKVRMANEGFDPSTLSDPLYVLDQAVGAYLPLTTARYSALLAGNLRI

SEQ ID NO: 80 - protein, 780 aa, Homo sapiens
MEQVEILRKFIQRVQAMKSPDHNGEDNFARDFMRLRRLSTKYRTEKIYPTATGEKEENVKKNRYKDILPFDHSRVKLTLKTPSQDSDYINANFIKGVYGPKAYVATQGPLANTVIDFWRMIWEYNVVIIVMACREFEMGRKKCERYWPLYGEDPITFAPFKISCEDEQARTDYFIRTLLLEFQNESRRLYQFHYVNWPDHDVPSSFDSILDMISLMRKYQEHEDVPICIHCSAGCGRTGAICAIDYTWNLLKAGKIPEEFNVFNLIQEMRTQRHSAVQTKEQYELVHRAIAQLFEKQLQLYEIHGAQKIADGVNEINTENMVSSIEPEKQDSPPPKPPRTRSCLVEGDAKEEILQPPEPHPVPPILTPSPPSAFPTVTTVWQDNDRYHPKPVLHMVSSEQHSADLNRNYSKSTELPGKNESTIEQIDKKLERNLSFEIKKVPLQEGPKSFDGNTLLNRGHAIKIKSASPCIADKISKPQELSSDLNVGDTSQNSCVDCSVTQSNKVSVTPPEESQNSDTPPRPDRLPLDEKGHVTWSFHGPENAIPIPDLSEGNSSDINYQTRKTVSLTPSPTTQVETPDLVDHDNTSPLFRTPLSFTNPLHSDDSDSDERNSDGAVTQNKTNISTASATVSAATSTESISTRKVLPMSIARHNIAGTTHSGAEKDVDVSEDSPPPLPERTPESFVLASEHNTPVRSEWSELQSQERSEQKKSEGLITSENEKCDHPAGGIHYEMCIECPPTFSDKREQISENPTEATDIGFGNRCGKPKGPRDPPSEWT

SEQ ID NO: 81 - protein, 125 aa, Homo sapiens
MGPGGPLLSPSRGFLLCKTGWHSNRLLGDCGPHTPVSTALSFIAVGMAAPSMKERQVCWGARDEYWKCLDENLEDASQCKKLRSSFESSCPQQWIKYFDKRRDYLKFKEKFEAGQFEPSETTAKS

SEQ ID NO: 82 - protein, 698 aa, Homo sapiens
MRRFLLLYATQQGQAKAIAEEICEQAVVHGFSADLHCISESDKYDLKTETAPLVVVVSTTGTGDPPDTARKFVKEIQNQTLPVDFFAHLRYGLLGLGDSEYTYFCNGGKIIDKRLQELGARHFYDTGHADDCVGLELVVEPWIAGLWPALRKHFRSSRGQEEISGALPVASPASSRTDLVKSELLHIESQVELLRFDDSGRKDSEVLKQNAVNSNQSNVVIEDFESSLTRSVPPLSQASLNIPGLPPEYLQVHLQESLGQEESQVSVTSADPVFQVPISKAVQLTTNDAIKTTLLVELDISNTDFSYQPGDAFSVICPNSDSEVQSLLQRLQLEDKREHCVLLKIKADTKKKGATLPQHIPAGCSLQFIFTWCLEIRAIPKKAFLRALVDYTSDSAEKRRLQELCSKQGAADYSRFVRDACACLLDLLLAFPSCQPPLSLLLEHLPKLQPRPYSCASSSLFHPGKLHFVFNIVEFLSTATTEVLRKGVCTGWLALLVASVLQPNIHASHEDSGKALAPKISISPRTTNSFHLPDDPSIPIIMVGPGTGIAPFIGFLQHREKLQEQHPDGNFGAMWLFFGCRHKDRDYLFRKELRHFLKHGILTHLKVSFSRDAPVGEEEAPAKYVQDNIQLHGQQVARILLQENGHIYVCGDAKNMAKDVHDALVQIISKEVGVEKLEAMKTLATLKEEKRYLQDIWS

SEQ ID NO: 83 - protein, 3661 aa, Homo sapiens
MSRRAPGSRLSSGGGGGGTKYPRSWNDWQPRTDSASADPDNLKYSSSRDRGGSSSYGLQPSNSAVVSRQRHDDTRVHADIQNDEKGGYSVNGGSGENTYGRKSLGQELRVNNVTSPEFTSVQHGSRALATKDMRKSQERSMSYSDESRLSNLLRRITREDDRDRRLATVKQLKEFIQQPENKLVLVKQLDNILAAVHDVLNESSKLLQELRQEGACCLGLLCASLSYEAEKIFKWIFSKFSSSAKDEVKLLYLCATYKALETVGEKKAFSSVMQLVMTSLQSILENVDTPELLCKCVKCILLVARCYPHIFSTNFRDTVDILVGWHIDHTQKPSLTQQVSGWLQSLEPFWVADLAFSTTLLGQFLEDMEAYAEDLSHVASGESVDEDVPPPSVSLPKLAALLRVFSTVVRSIGERFSPIRGPPITEAYVTDVLYRVMRCVTAANQVFFSEAVLTAANECVGVLLGSLDPSMTIHCDMVITYGLDQLENCQTCGTDYIISVLNLLTLIVEQINTKLPSSFVEKLFIPSSKLLFLRYHKEKEVVAVAHAVYQAVLSLKNIPVLETAYKLILGEMTCALNNLLHSLQLPEACSEIKHEAFKNHVFNVDNAKFVVIFDLSALTTIGNAKNSLIGMWALSPTVFALLSKNLMIVHSDLAVHFPAIQYAVLYTLYSHCTRHDHFISSSLSSSSPSLFDGAVISTVTTATKKHFSIILNLLGILLKKDNLNQDTRKLLMTWALEAAVLMKKSETYAPLFSLPSFHKFCKGLLANTLVEDVNICLQACSSLHALSSSLPDDLLQRCVDVCRVQLVHSGTRIRQAFGKLLKSIPLDVVLSNNNHTEIQEISLALRSHMSKAPSNTFHPQDFSDVISFILYGNSHRTGKDNWLERLFYSCQRLDKRDQSTIPRNLLKTDAVLWQWAIWEAAQFTVLSKLRTPLGRAQDTFQTIEGIIRSLAAHTLNPDQDVSQWTTADNDEGHGNNQLRLVLLLQYLENLEKLMYNAYEGCANALTSPPKVIRTFFYTNRQTCQDWLTRIRLSIMRVGLLAGQPAVTVRHGFDLLTEMKTTSLSQGNELEVTIMMVVEALCELHCPEAIQGIAVWSSSIVGKNLLWINSVAQQAEGRFEKASVEYQEHLCAMTGVDCCISSFDKSVLTLANAGRNSASPKHSLNGESRKTVLSKPTDSSPEVINYLGNKACECYISIADWAAVQEWQNAIHDLKKSTSSTSLNLKADFNYIKSLSSFESGKFVECTEQLELLPGENINLLAGGSKEKIDMKKLLPNMLSPDPRELQKSIEVQLLRSSVCLATALNPIEQDQKWQSITENVVKYLKQTSRIAIGPLRLSTLTVSQSLPVLSTLQLYCSSALENTVSNRLSTEDCLIPLFSEALRSCKQHDVRPWMQALRYTMYQNQLLEKIKEQTVPIRSHLMELGLTAAKFARKRGNVSLATRLLAQCSEVQLGKTTTAQDLVQHFKKLSTQGQVDEKWGPELDIEKTKLLYTAGQSTHAMEMLSSCAISFCKSVKAEYAVAKSILTLAKWIQAEWKEISGQLKQVYRAQHQQNFTGLSTLSKNILTLIELPSVNTMEEEYPRIESESTVHIGVGEPDFILGQLYHLSSVQAPEVAKSWAALASWAYRWGRKVVDNASQGEGVRLLPREKSEVQNLLPDTITEEEKERIYGILGQAVCRPAGIQDEDITLQITESEDNEEDDMVDVIWRQLISSCPWLSELDESATEGVIKVWRKVVDRIFSLYKLSCSAYFTFLKLNAGQIPLDEDDPRLHLSHRVEQSTDDMIVMATLRLLRLLVKHAGELRQYLEHGLETTPTAPWRGIIPQLFSRLNHPEVYVRQSICNLLCRVAQDSPHLILYPAIVGTISLSSESQASGNKFSTAIPTLLGNIQGEELLVSECEGGSPPASQDSNKDEPKSGLNEDQAMMQDCYSKIVDKLSSANPTMVLQVQMLVAELRRVTVLWDELWLGVLLQQHMYVLRRIQQLEDEVKRVQNNNTLRKEEKIAIMREKHTALMKPIVFALEHVRSITAAPAETPHEKWFQDNYGDAIENALEKLKTPLNPAKPGSSWIPFKEIMLSLQQRAQKRASYILRLEEISPWLAAMTNTEIALPGEVSARDTVTIHSVGGTITILPTKTKPKKLLFLGSDGKSYPYLFKGLEDLHLDERIMQFLSIVNTMFATINRQETPRFHARHYSVTPLGTRSGLIQWVDGATPLFGLYKRWQQREAALQAQKAQDSYQTPQNPGIVPRPSELYYSKIGPALKTVGLSLDVSRRDWPLHVMKAVLEELMEATPPNLLAKELWSSCTTPDEWWRVTQSYARSTAVMSMVGYIIGLGDRHLDNVLIDMTTGEVVHIDYNVCFEKGKSLRVPEKVPFRMTQNIETALGVTGVEGVFRLSCEQVLHIMRRGRETLLTLLEAFVYDPLVDWTAGGEAGFAGAVYGGGGQQAESKQSKREMEREITRSLFSSRVAEIKVNWFKNRDEMLVVLPKLDGSLDEYLSLQEQLTDVEKLQGKLLEEIEFLEGAEGVDHPSHTLQHRYSEHTQLQTQQRAVQEAIQVKLNEFEQWITHYQAAFNNLEATQLASLLQEISTQMDLGPPSYVPATAFLQNAGQAHLISQCEQLEGEVGALLQQRRSVLRGCLEQLHHYATVALQYPKAIFQKHRIEQWKTWMEELICNTTVERCQELYRKYEMQYAPQPPPTVCQFITATEMTLQRYAADINSRLIRQVERLKQEAVTVPVCEDQLKEIERCIKVFLHENGEEGSLSLASVIISALCTLTRRNLMMEGAASSAGEQLVDLTSRDGAWFLEELCSMSGNVTCLVQLLKQCHLVPQDLDIPNPMEASETVHLANGVYTSLQELNSNFRQIIFPEALRCLMKGEYTLESMLHELDGLIEQTTDGVPLQTLVESLQAYLRNAAMGLEEETHAHYIDVARLLHAQYGELIQPRNGSVDETPKMSAGQMLLVAFDGMFAQVETAFSLLVEKLNKMEIPIAWRKIDIIREARSTQVNFFDDDNHRQVLEEIFFLKRLQTIKEFFRLCGTFSKTLSGSSSLEDQNTVNGPVQIVNVKTLFRNSCFSEDQMAKPIKAFTADFVRQLLIGLPNQALGLTLCSFISALGVDIIAQVEAKDFGAESKVSVDDLCKKAVEHNIQIGKFSQLVMNRATVLASSYDTAWKKHDLVRRLETSISSCKTSLQRVQLHIAMFQWQHEDLLINRPQAMSVTPPPRSAILTSMKKKLHTLSQIETSIATVQEKLAALESSIEQRLKWAGGANPALAPVLQDFEATIAERRNLVLKESQRASQVTFLCSNIIHFESLRTRTAEALNLDAALFELIKRCQQMCSFASQFNSSVSELELRLLQRVDTGLEHPIGSSEWLLSAHKQLTQDMSTQRAIQTEKEQQIETVCETIQNLVDNIKTVLTGHNRQLGDVKHLLKAMAKDEEAALADGEDVPYENSVRQFLGEYKSWQDNIQTVLFTLVQAMGQVRSQEHVEMLQEITPTLKELKTQSQSIYNNLVSFASPLVTDATNECSSPTSSATYQPSFAAAVRSNTGQKTQPDVMSQNARKLIQKNLATSADTPPSTVPGTGKSVACSPKKAVRDPKTGKAVQERNSYAVSVWKRVKAKLEGRDVDPNRRMSVAEQVDYVIKEATNLDNLAQLYEGWTAWV

SEQ ID NO: 84 - protein, 973 aa, Homo sapiens
METKVHLFCQAEENIDLLDDGSNSFATDLSSGTINHKKYIKFSKTIEKEISPEIRSLSPEYKKIFETSIIFCGEEKSSDFSGEKKVGRKSLQVQQHSKRTEIIPPFLKLSKEKVTRKENSLCKLPNQYSVHKTSSPLCTSSAITREKEMLSNLYMTLYDEVTHGYLHSKELSALHKACKIFSKIRSGKIYVNDLPVILCILRISISDLEMRQALKTVDIDAFQDALKIFCRIKGGRVSTDDVFAVLDSMGIPINREILEEVTKHTYIDSNHMVDIGDIIFTLNELQEQYEDVSITEGSPLNEITSDRKLSSVAGCYLKYKKKNSLSSKLPEPSISKKLNKKSNQYYSKIMENDDLESKRPKNTWQIRKFLGGVGSSNVGVQEPYSKNGINFKKHSEKGEIHDSKSKPQSLKSSTSLSKSLDKSDISSIPKLQKPAVRKHSSLQKQVSSTEKTAISTLENFCEAISKLQENYIAAEELQSILPSTGINLLDEEFQKIVTDTSRNENGMVELDDFVNALAKERSFPECNALPGVIKAIDKIKDKNVDYEDLNTCLQNFGIYLSKPEFKKITELTEAGETKKVNFKEFIDTMMSNTECFSEKLVLPDAIETLDDLRKETMSVSDLWNTLSSLNSNLKKDEFLAALELVTVDEGDKVQFEEFAKVVRNMRDAARLEELQEVVLAADLLEGDMIAGKNLEDFLRNVGIKSPKEEVEKILQSDFVSEDNMVNIKDCMRALRDTQKFSNYIDFRKEASNLKLPKVNEIKEAANILSHVDNGKIGIPDLEHALKCLNVNLTEEDFNEALNCCNVSDNMEVDLKDFLMKMKESPHFQKSKATQILLATTQILQNDLVDVSDLKTLLMDKDLHTANAILTVMLRHVPEHESGKVSIQEFMTKLSDILTIPKAAGKFYLICTYCPDLERQAVVYMLKTIQDSIVKAQVSKKQYNMNIKQHKISLHNFCLNSKANIAKLNPNSKF

SEQ ID NO: 85 - protein, 93 aa, Homo sapiens
MKLLMVLMLAALSQHCYAGSGCPLLENVISKTINPQVSKTEYKELLQEFIDDNATTNAIDELKECFLNQTDETLSNVEVFMQLIYDSSLCDLF

SEQ ID NO: 86 - protein, 410 aa, Homo sapiens
MDDLMLSPDDIEQWFTEDPGPDEAPRMPEAAPPVAPAPAAPTPAAPAPAPSWPLSSSVPSQKTYQGSYGFRLGFLHSGTAKSVTCTYSPALNKMFCQLAKTCPVQLWVDSTPPPGTRVRAMAIYKQSQHMTEVVRRCPHHERCSDSDGLAPPQHLIRVEGNLRVEYLDDRNTFRHSVVVPYEPPEVGSDCTTIHYNYMCNSSCMGGMNRRPILTIITLEDSSGNLLGRNSFEVRVCACPGRDRRTEEENLRKKGEPHHELPPGSTKRALPNNTSSSPQPKKKPLDGEYFTLQIRGRERFEMFRELNEALELKDAQAGKEPGGSRAHSRECQTLSPGDPDPPLSETFNLNICPYPAGKLELLKLSPCPCLCRQVTLMSFLFFFLIFFYFRLYWGIIDPPKLHTFKVCSVMI

SEQ ID NO: 87 - protein, 979 aa, Homo sapiens; identical to SEQ ID NO: 70

SEQ ID NO: 88 - protein, 188 aa, Homo sapiens
MNGDDAFARRPTVGAQIPEKIQKAFDDIAKYFSKEEWEKMKASEKIFYVYMKRKYEAMTKLGFKATLPPFMCNKRAEDFQGNDLDNDPNRGNQVERPQMTFGRLQGISPKIMPKKPAEEGNDSEEVPEASGPQNDGKELCPPGKPTTSEKIHERSGPKRGEHAWTHRLRERKQLVIYEEISDPEEDDE

SEQ ID NO: 89 - protein, 393 aa, Homo sapiens [sequence omitted]

SEQ ID NO: 90 - protein, 642 aa, Homo sapiens
GMAKAAAIGIDLGTTYSCVGVFQHGKVEIIANDQGNRTTPSYVAFTDTERLIGDAAKNQVALNPQNTVFDAKRLIGRKFGDPVVQSDMKHWPFQVINDGDKPKVQVSYKGETKAFYPEEISSMVLTKMKEIAEAYLGYPVTNAVITVPAYFNDSQRQATKDAGVIAGLNVLRIINEPTAAAIAYGLDRTGKGERNVLIFDLGGGTFDVSILTIDDGIFEVKATAGDTHLGGEDFDNRLVNHFVEEFKRKHKKDISQNKRAVRRLRTACERAKRTLSSSTQASLEIDSLFEGIDFYTSITRARFEELCSDLFRSTLEPVEKALRDAKLDKAQIHDLVLVGGSTRIPKVQKLLQDFFNGRDLNKSINPDEAVAYGAAVQAAILMGDKSENVQDLLLLDVAPLSLGLETAGGVMTALIKRNSTIPTKQTQIFTTYSDNQPGVLIQVYEGERAMTKDNNLLGRFELSGIPPAPRGVPQIEVTFDIDANGILNVTATDKSTGKANKITITNDKGRLSKEEIERMVQEAEKYKAEDEVQRERVSAKNALESYAFNMKSAVEDEGLKGKISEADKKKVLDKCQEVISWLDANTLAEKDEFEHKRKELEQVCNPIISGLYQGAGGPGPGGFGAQGPKGGSGSGPTIEEVD

SEQ ID NO: 91 - protein, 98 aa, Alphapapillomavirus
MHGDTPTLHEYMLDLQPETTDLYCYEQLNDSSEEEDEIDGPAGQAEPDRAHYNIVTFCCKCDSTLRLCVQSTHVDIRTLEDLLMGTLGIVCPICSQKP

SEQ ID NO: 92 - protein, 158 aa, Alphapapillomavirus
MHQKRTAMFQDPQERPRKLPQLCTELQTTIHDIILECVYCKQQLLRREVYDFAFRDLCIVYRDGNPYAVCDKCLKFYSKISEYRHYCYSLYGTTLEQQYNKPLCDLLIRCINCQKPLCPEEKQRHLDKKQRFHNIRGRWTGRCMSCCRSSRTRRETQL

SEQ ID NO: 93 - protein, 505 aa, Human papillomavirus 16
MSLWLPSEATVYLPPVPVSKVVSTDEYVARTNIYYHAGTSRLLAVGHPYFPIKKPNNNKILVPKVSGLQYRVFRIHLPDPNKFGFPDTSFYNPDTQRLVWACVGVEVGRGQPLGVGISGHPLLNKLDDTENASAYAANAGVDNRECISMDYKQTQLCLIGCKPPIGEHWGKGSPCTNVAVNPGDCPPLELINTVIQDGDMVDTGFGAMDFTTLQANKSEVPLDICTSICKYPDYIKMVSEPYGDSLFFYLRREQMFVRHLFNRAGAVGENVPDDLYIKGSGSTANLASSNYFPTPSGSMVTSDAQIFNKPYWLQRAQGHNNGICWGNQLFVTVVDTTRSTNMSLCAAISTSETTYKNTNFKEYLRHGEEYDLQFIFQLCKITLTADVMTYIHSMNSTILEDWNFGLQPPPGGTLEDTYRFVTSQAIACQKHTPPAPKEDPLKKYTFWEVNLKEKFSADLDQFPLGRKFLLQAGLKAKPKFTLGKRKATPTTSSTSTTAKRKKRKL

SEQ ID NO: 94 - protein, 649 aa, Human papillomavirus 16
MADPAGTNGEEGTGCNGWFYVEAVVEKKTGDAISDDENENDSDTGEDLVDFIVNDNDYLTQAETETAHALFTAQEAKQHRDAVQVLKRKYLVSPLSDISGCVDNNISPRLKAICIEKQSRAAKRRLFESEDSGYGNTEVETQQMLQVEGRHETETPCSQYSGGSGGGCSQYSSGSGGEGVSERHTICQTPLTNILNVLKTSNAKAAMLAKFKELYGVSFSELVRPFKSNKSTCCDWCIAAFGLTPSIADSIKTLLQQYCLYLHIQSLACSWGMVVLLLVRYKCGKNRETIEKLLSKLLCVSPMCMMIEPPKLRSTAAALYWYKTGISNISEVYGDTPEWIQRQTVLQHSFNDCTFELSQMVQWAYDNDIVDDSEIAYKYAQLADTNSNASAFLKSNSQAKIVKDCATMCRHYKRAEKKQMSMSQWIKYRCDRVDDGGDWKQIVMFLRYQGVEFMSFLTALKRFLQGIPKKNCILLYGAANTGKSLFGMSLMKFLQGSVICFVNSKSHFWLQPLADAKIGMLDDATVPCWNYIDDNLRNALDGNLVSMDVKHRPLVQLKCPPLLITSNINAGTDSRWPYLHNRLVVFTFPNEFPFDENGNPVYELNDKNWKSFFSRTWSRLSLHEDEDKENDGDSLPTFKCVSGQNTNTL

SEQ ID NO: 95 - protein, 365 aa, Human papillomavirus 16
METLCQRLNVCQDKILTHYENDSTDLRDHIDYWKHMRLECAIYYKAREMGFKHINHQVVPTLAVSKNKALQAIELQLTLETIYNSQYSNEKWTLQDVSLEVYLTAPTGCIKKHGYTVEVQFDGDICNTMHYTNWTHIYICEEASVTVVEGQVDYYGLYYVHEGIRTYFVQFKDDAEKYSKNKVWEVHAGGQVILCPTSVFSSNEVSSPEIIRQHLANHPAATHTKAVALGTEETQTTIQRPRSEPDTGNPCHTTKLLHRDSVDSAPILTAFNSSHKGRINCNSNTTPIVHLKGDANTLKCLRYRFKKHCTLYTAVSSTWHWTGHNVKHKSAIVTLTYDSEWQRDQFLSQVKIPKTITVSTGFMSI

SEQ ID NO: 96 - protein, 278 aa, Human coronavirus OC43
MAVAYADKPNHFINFPLTHFQGFVLNYKGLQFQILDEGVDCKIQTAPHISLTMLDIQPEDYKSVDVAIQEVIDDMHWGDGFQIKFENPHILGRCIVLDVKGVEELHDDLVNYIRDKGCVADQSRKWIGHCTIAQLTDAALSIKENVDFINSMQFNYKITINPSSPARLEIVKLGAEKKDGFYETIVSHWMGIRFEYTSPTDKLAMIMGYCCLDVVRKELEEGDLPENDDDAWFKLSYHYENNSWFFRHVYRKSFHFRKACQNLDCNCLGFYESPVEED

SEQ ID NO: 97 - protein, 440 aa, Homo sapiens
MGSSHLLNKGLPLGVRPPIMNGPLHPRPLVALLDGRDCTVEMPILKDVATVAFCDAQSTQEIHEKVLNEAVGALMYHTITLTREDLEKFKALRIIVRIGSGFDNIDIKSAGDLGIAVCNVPAASVEETADSTLCHILNLYRRATWLHQALREGTRVQSVEQIREVASGAARIRGETLGIIGLGRVGQAVALRAKAFGFNVLFYDPYLSDGVERALGLQRVSTLQDLLFHSDCVTLHCGLNEHNHHLINDFTVKQMRQGAFLVNTARGGLVDEKALAQALKEGRIRGAALDVHESEPFSFSQGPLKDAPNLICTPHAAWYSEQASIEMREEAAREIRRAITGRIPDSLKNCVNKDHLTAATHWASMDPAVVHPELNGAAYRYPPGVVGVAPTGIPAAVEGIVPSAMSLSHGLPPVAHPPHAPSPGQTVKPEADRDHASDQL

SEQ ID NO: 98 - protein, 15 aa, Homo sapiens
GLPTDTIRKEFRTRM

SEQ ID NO: 99 - protein, 15 aa, Homo sapiens
LFGLGKDEGWGPPAR

SEQ ID NO: 100 - protein, 15 aa, Homo sapiens
TFNCHHARPWHNQFV

SEQ ID NO: 101 - protein, 9 aa, Homo sapiens
NLVPMVATV

SEQ ID NO: 102 - protein, 10 aa, Homo sapiens
TPRVTGGGAM

SEQ ID NO: 103 - protein, 15 aa, Homo sapiens
FEGTEMWNPNRELSE

SEQ ID NO: 104 - protein, 9 aa, Homo sapiens
AIGIGAYLV

SEQ ID NO: 105 - protein, 9 aa, Homo sapiens
SVQGIIIYR

SEQ ID NO: 106 - protein, 9 aa, Homo sapiens
VDGIGILTI

SEQ ID NO: 107 - protein, 11 aa, Homo sapiens
SASVQRADTSL

SEQ ID NO: 108 - protein, 9 aa, Homo sapiens
ATIIDILTK

SEQ ID NO: 109 - protein, 10 aa, Homo sapiens
ILEGIGILAV

SEQ ID NO: 110 - protein, 10 aa, Homo sapiens
ILEGIGILSV

SEQ ID NO: 111 - protein, 15 aa, Homo sapiens
MNAAVTFANCALGRV

SEQ ID NO: 112 - protein, 15 aa, Homo sapiens
PWRKFPVYVLGQFLG

SEQ ID NO: 113 - protein, 15 aa, Homo sapiens
INCLSSPNEETVLSA

SEQ ID NO: 114 - protein, 15 aa, Homo sapiens
STAYPAPMRRRCCLP

SEQ ID NO: 115 - protein, 9 aa, Homo sapiens
ILDEKPVII

SEQ ID NO: 116 - protein, 9 aa, Homo sapiens
VLNGTVHPV

SEQ ID NO: 117 - protein, 8 aa, Homo sapiens
ALIGGPPV

SEQ ID NO: 118 - protein, 12 aa, Homo sapiens
HIENFSDIDMGE

SEQ ID NO: 119 - protein, 15 aa, Homo sapiens
VALKPQERVEKRQTP

SEQ ID NO: 120 - protein, 8 aa, Homo sapiens
TLGEFLKL

SEQ ID NO: 121 - protein, 10 aa, Homo sapiens
QLCPICRAPV

SEQ ID NO: 122 - protein, 9 aa, Homo sapiens
AFLGERVTL

SEQ ID NO: 123 - protein, 9 aa, Homo sapiens
FLGERVTLT

SEQ ID NO: 124 - protein, 9 aa, Homo sapiens
KLGPGEEQV

SEQ ID NO: 125 - protein, 9 aa, Homo sapiens
RFIAQLLLL

SEQ ID NO: 126 - protein, 9 aa, Homo sapiens
TLTSYWRRV

SEQ ID NO: 127 - protein, 9 aa, Homo sapiens
FLLAMTSLR

SEQ ID NO: 128 - protein, 9 aa, Homo sapiens
RPKSNIVLL

SEQ ID NO: 129 - protein, 8 aa, Homo sapiens
RPKSNIVL

SEQ ID NO: 130 - protein, 9 aa, Homo sapiens
GLCTLVAML

SEQ ID NO: 131 - protein, 9 aa, Homo sapiens
LLGIGILVL

SEQ ID NO: 132 - protein, 10 aa, Homo sapiens
LLLGIGILVL

SEQ ID NO: 133 - protein, 15 aa, Homo sapiens
VQLRGRAQGGGALRA

SEQ ID NO: 134 - protein, 10 aa, Homo sapiens
HVYDGKFLAR

SEQ ID NO: 135 - protein, 9 aa, Homo sapiens
GLLSLEEEL

SEQ ID NO: 136 - protein, 20 aa, Homo sapiens
ARRRRRAEKKAADVARRKQE

SEQ ID NO: 137 - protein, 12 aa, Homo sapiens
RRRAEKKAADVA

SEQ ID NO: 138 - protein, 8 aa, Homo sapiens
RAKFKQLL

SEQ ID NO: 139 - protein, 10 aa, Homo sapiens
SPTSSRTSSL

SEQ ID NO: 140 - protein, 15 aa, Homo sapiens
ARAAAAAAFEIDPRS

SEQ ID NO: 141 - protein, 10 aa, Homo sapiens
LLAALVQDYL

SEQ ID NO: 142 - protein, 10 aa, Homo sapiens
CMLGTYTQDF

SEQ ID NO: 143 - protein, 9 aa, Homo sapiens
FLALSILVL

SEQ ID NO: 144 - protein, 15 aa, Homo sapiens
GNLSTCMLGTYTQDF

SEQ ID NO: 145 - protein, 15 aa, Homo sapiens
MGFQKFSPFLALSIL

SEQ ID NO: 146 - protein, 10 aa, Homo sapiens
VLLQAGSLHA

SEQ ID NO: 147 - protein, 9 aa, Homo sapiens
SLLMWITQC

SEQ ID NO: 148 - protein, 20 aa, Homo sapiens
WITQCFLPVFLAQPPSGQRR

SEQ ID NO: 149 - protein, 9 aa, Homo sapiens
QLSLLMWIT

SEQ ID NO: 150 - protein, 13 aa, Homo sapiens
APRGPHGGAASGL

SEQ ID NO: 151 - protein, 9 aa, Homo sapiens
EFTVSGNIL

SEQ ID NO: 152 - protein, 20 aa, Homo sapiens
LPVPGVLLKEFTVSGNILTI

SEQ ID NO: 153 - protein, 20 aa, Homo sapiens
RGPESRLLEFYLAMPFATPM

SEQ ID NO: 154 - protein, 20 aa, Homo sapiens
RLLEFYLAMPFATPMEAELA

SEQ ID NO: 155 - protein, 20 aa, Homo sapiens
VLLKEFTVSGNILTIRLTAA

SEQ ID NO: 156 - protein, 10 aa, Homo sapiens
DIAGIGLKTV

SEQ ID NO: 157 - protein, 9 aa, Clostridium sp. E02
GAGIGVLTA

SEQ ID NO: 158 - protein, 9 aa, Homo sapiens
HLSTAFARV

SEQ ID NO: 159 - protein, 14 aa, Homo sapiens
LPSQAFEYILYNKG

SEQ ID NO: 160 - protein, 14 aa, Homo sapiens
KPGVIFLTKRSRQV

SEQ ID NO: 161 - protein, 9 aa, Homo sapiens
KVSAVTLAY

SEQ ID NO: 162 - protein, 10 aa, Homo sapiens
KLMSPKLYVW

SEQ ID NO: 163 - protein, 10 aa, Homo sapiens
VEGSGELFRW

SEQ ID NO: 164 - protein, 15 aa, Homo sapiens
STATHSPATTSHGNA

SEQ ID NO: 165 - protein, 15 aa, Homo sapiens
VTVHPTSNSTATSQG

SEQ ID NO: 166 - protein, 9 aa, Homo sapiens
AVGIGIAVV

SEQ ID NO: 167 - protein, 9 aa, Homo sapiens
YGYDNVKEY

SEQ ID NO: 168 - protein, 15 aa, Homo sapiens
LQREYASVKEENERL

SEQ ID NO: 169 - protein, 13 aa, Homo sapiens
MEVSGCPTPAGQS

SEQ ID NO: 170 - protein, 9 aa, Homo sapiens
RTIAPIIGR

SEQ ID NO: 171 - protein, 10 aa, Homo sapiens
STPPPGATRV

SEQ ID NO: 172 - protein, 25 aa, Homo sapiens
HYNYMCNSSCMGGMNRRPILTIITL

SEQ ID NO: 173 - protein, 15 aa, Homo sapiens
HGLSHSLRQISSQLS

SEQ ID NO: 174 - protein, 9 aa, Homo sapiens
RFEEKHAYF

SEQ ID NO: 175 - protein, 10 aa, Homo sapiens
MQLMPFGCLL

SEQ ID NO: 176 - protein, 11 aa, Homo sapiens
LIMQLMPFGCL

SEQ ID NO: 177 - protein, 8 aa, Homo sapiens
YPFKPPKV

SEQ ID NO: 178 - protein, 15 aa, Homo sapiens
ETGPEAERLEQLESG

SEQ ID NO: 179 - protein, 9 aa, Homo sapiens
AVMRWGMPP

SEQ ID NO: 180 - protein, 13 aa, Homo sapiens
ILFSLQPGLLRDW

SEQ ID NO: 181 - protein, 13 aa, Homo sapiens
MFTLTGCRLVEKT

SEQ ID NO: 182 - protein, 8 aa, Homo sapiens
RLWQELSD

SEQ ID NO: 183 - protein, 10 aa, Homo sapiens
ATAGIIGVNR

SEQ ID NO: 184 - protein, 15 aa, Homo sapiens
THRPGGKHGRLAGGS

SEQ ID NO: 185 - protein, 15 aa, Homo sapiens
SSLPGPPGPPGPPGP

SEQ ID NO: 186 - protein, 15 aa, Homo sapiens
EVPMCSDPEPRQEVP

SEQ ID NO: 187 - protein, 15 aa, Homo sapiens
VTTKKTPPSQPPGNV

SEQ ID NO: 188 - protein, 9 aa, Homo sapiens
YLNKEIEEA

SEQ ID NO: 189 - protein, 25 aa, Homo sapiens
ARGGLVDEKALAQALKEGRIRGAAL

SEQ ID NO: 190 - protein, 9 aa, Homo sapiens
ALTPVVVTL

SEQ ID NO: 191 - protein, 14 aa, Homo sapiens
DFGFARTLAAPGDI

SEQ ID NO: 192 - protein, 13 aa, Homo sapiens
INFKIERGQLLAV

SEQ ID NO: 193 - protein, 9 aa, Homo sapiens
GLGIGALVL

SEQ ID NO: 194 - protein, 15 aa, Homo sapiens
QWIKYFDKRRDYLKF

SEQ ID NO: 195 - protein, 15 aa, Homo sapiens
FSISQLQKNHDMNDE

SEQ ID NO: 196 - protein, 15 aa, Homo sapiens
AVKRLPLVYCDYHGH

SEQ ID NO: 197 - protein, 9 aa, Homo sapiens
MLLDKNIPI

SEQ ID NO: 198 - protein, 9 aa, Homo sapiens
IAGPGTITL

SEQ ID NO: 199 - protein, 9 aa, Homo sapiens
SSSGLHPPK

SEQ ID NO: 200 - protein, 9 aa, Homo sapiens
VTEHDTLLY

SEQ ID NO: 201 - protein, 15 aa, Homo sapiens
SSAEPTEHGERTPLA

SEQ ID NO: 202 - protein, 9 aa, Homo sapiens
KPRQSSPQL

SEQ ID NO: 203 - protein, 15 aa, Homo sapiens
GLYYVHEGIRTYFVQ

SEQ ID NO: 204 - protein, 9 aa, Homo sapiens
YLTAPTGCI

SEQ ID NO: 205 - protein, 9 aa, Homo sapiens
DSAPILTAF

SEQ ID NO: 206 - protein, 10 aa, Homo sapiens
ILTAFNSSHK

SEQ ID NO: 207 - protein, 9 aa, Homo sapiens
KSAIVTLTY

SEQ ID NO: 208 - protein, 9 aa, Homo sapiens
LAVSKNKAL

SEQ ID NO: 209 - protein, 9 aa, Homo sapiens
LQDVSLEVY

SEQ ID NO: 210 - protein, 10 aa, Homo sapiens
LTAPTGCIKK

SEQ ID NO: 211 - protein, 9 aa, Homo sapiens
NPCHTTKLL

SEQ ID NO: 212 - protein, 9 aa, Homo sapiens
NTTPIVHLK

SEQ ID NO: 213 - protein, 9 aa, Homo sapiens
QVILCPTSV

SEQ ID NO: 214 - protein, 9 aa, Homo sapiens
RLECAIYYK

SEQ ID NO: 215 - protein, 9 aa, Homo sapiens
SPEIIRQHL

SEQ ID NO: 216 - protein, 10 aa, Homo sapiens
TLKCLRYRFK

SEQ ID NO: 217 - protein, 9 aa, Homo sapiens
TLYTAVSST

SEQ ID NO: 218 - protein, 9 aa, Homo sapiens
VVEGQVDYY

SEQ ID NO: 219 - protein, 9 aa, Homo sapiens
YRFKKHCTL

SEQ ID NO: 220 - protein, 10 aa, Homo sapiens
YYVHEGIRTY

SEQ ID NO: 221 - protein, 9 aa, Homo sapiens
ALQAIELQL

SEQ ID NO: 222 - protein, 9 aa, Homo sapiens
TLQDVSLEV

SEQ ID NO: 223 - protein, 10 aa, Homo sapiens
YICEEASVTV

SEQ ID NO: 224 - protein, 15 aa, Homo sapiens
CQDKILTHYENDSTD

SEQ ID NO: 225 - protein, 15 aa, Homo sapiens
EEASVTVVEGQVDYY

SEQ ID NO: 226 - protein, 15 aa, Homo sapiens
QVILCPTSVFSSNEV

SEQ ID NO: 227 - protein, 15 aa, Homo sapiens
TEETQTTIQRPRSEP

SEQ ID NO: 228 - protein, 9 aa, Homo sapiens
VLFYLGQYI

SEQ ID NO: 229 - protein, 9 aa, Homo sapiens
DEKQQHIVY

SEQ ID NO: 230 - protein, 9 aa, Homo sapiens
DEVYQVTVY

SEQ ID NO: 231 - protein, 15 aa, Homo sapiens
PSRHRYGARQPRARL

SEQ ID NO: 232 - protein, 15 aa, Homo sapiens
LGLWRGEEVTLSNPK

SEQ ID NO: 233 - protein, 15 aa, Homo sapiens
LWTEGMLQMAFHILA

SEQ ID NO: 234 - protein, 15 aa, Homo sapiens
LLSVSTYTSLILLVL

SEQ ID NO: 235 - protein, 9 aa, Homo sapiens
YIIFVYIPL

SEQ ID NO: 236 - protein, 9 aa, Homo sapiens
FAFRDLCIV

SEQ ID NO: 237 - protein, 9 aa, Homo sapiens
IILECVYCK

SEQ ID NO: 238 - protein, 10 aa, Homo sapiens
LLIRCINCQK

SEQ ID NO: 239 - protein, 9 aa, Homo sapiens
PYAVCDKCL

SEQ ID NO: 240 - protein, 9 aa, Homo sapiens
TTLEQQYNK

SEQ ID NO: 241 - protein, 9 aa, Homo sapiens
VCDKCLKFY

SEQ ID NO: 242 - protein, 9 aa, Homo sapiens
CPEEKQRHL

SEQ ID NO: 243 - protein, 9 aa, Homo sapiens
QYNKPLCDL

SEQ ID NO: 244 - protein, 10 aa, Homo sapiens
FAFSDLCIVY

SEQ ID NO: 245 - protein, 15 aa, Homo sapiens
LKFYSKISEYRHYCY

SEQ ID NO: 246 - protein, 10 aa, Homo sapiens
AVCDKCLKFY

SEQ ID NO: 247 - protein, 10 aa, Homo sapiens
CVYCKQQLLR

SEQ ID NO: 248 - protein, 10 aa, Homo sapiens
NPYAVCDKCL

SEQ ID NO: 249 - protein, 10 aa, Homo sapiens
RPRKLPQLCT

SEQ ID NO: 250 - protein, 10 aa, Homo sapiens
YAVCDKCLKF

SEQ ID NO: 251 - protein, 9 aa, Homo sapiens
YGTTLEQQY

SEQ ID NO: 252 - protein, 9 aa, Homo sapiens
CYSLYGTTL

SEQ ID NO: 253 - protein, 10 aa, Homo sapiens
FAFRDLCIVY

SEQ ID NO: 254 - protein, 9 aa, Homo sapiens
EYRHYCYSL

SEQ ID NO: 255 - protein, 15 aa, Homo sapiens
PRKLPQLCTELQTTI

SEQ ID NO: 256 - protein, 10 aa, Homo sapiens
QYNKPLCDLL

SEQ ID NO: 257 - protein, 9 aa, Homo sapiens
VYDFAFQDL

SEQ ID NO: 258 - protein, 10 aa, Homo sapiens
FACYDLCIVY

SEQ ID NO: 259 - protein, 9 aa, Homo sapiens
ILIRCIICQ

SEQ ID NO: 260 - protein, 9 aa, Homo sapiens
KCLNEILIR

SEQ ID NO: 261 - protein, 9 aa, Homo sapiens
KVCLRLLSK

SEQ ID NO: 262 - protein, 10 aa, Homo sapiens
GIVCPICSQK

SEQ ID NO: 263 - protein, 9 aa, Homo sapiens
IVCPICSQK

SEQ ID NO: 264 - protein, 9 aa, Homo sapiens
QAEPDRAHY

SEQ ID NO: 265 - protein, 20 aa, Homo sapiens
QSTHVDIRTLEDLLMGTLGI

SEQ ID NO: 266 - protein, 9 aa, Homo sapiens
RAHYNIVTF

SEQ ID NO: 267 - protein, 8 aa, Homo sapiens
TLGIVCPI

SEQ ID NO: 268 - protein, 35 aa, Homo sapiens
AGQAEPDRAHYNIVTFCCKCDSTLRLCVQSTHVDI

SEQ ID NO: 269 - protein, 32 aa, Homo sapiens
MHGDTPTLHEYMLDLQPETTDLYCYEQLNDSS

SEQ ID NO: 270 - protein, 36 aa, Homo sapiens
TDLYCYEQLNDSSEEEDEIDGPAGQAEPDRAHYNIV

SEQ ID NO: 271 - protein, 13 aa, Homo sapiens
LFMDSLNFVCPWC

SEQ ID NO: 272 - protein, 18 aa, Homo sapiens
EIDGPAGQAEPDRAHYNI

SEQ ID NO: 273 - protein, 15 aa, Homo sapiens
GVNHQHLPARRAEPQ

SEQ ID NO: 274 - protein, 10 aa, Homo sapiens
HGDTPTLHEY

SEQ ID NO: 275 - protein, 10 aa, Homo sapiens
HYNIVTFCCK

SEQ ID NO: 276 - protein, 11 aa, Homo sapiens
LMGTLGIVCPI

SEQ ID NO: 277 - protein, 15 aa, Homo sapiens
MLDLQPETTDLYCYE

SEQ ID NO: 278 - protein, 15 aa, Homo sapiens
TLRLCVQSTHVDIRT

SEQ ID NO: 279 - protein, 9 aa, Homo sapiens
LQPETTDLY

SEQ ID NO: 280 - protein, 9 aa, Homo sapiens
TPTLHEYML

SEQ ID NO: 281 - protein, 15 aa, Homo sapiens
DRAHYNIVTFCCKCD

SEQ ID NO: 282 - protein, 14 aa, Homo sapiens
DSTLRLCVQSTHVD

SEQ ID NO: 283 - protein, 9 aa, Homo sapiens
GTLGIVCPI

SEQ ID NO: 284 - protein, 9 aa, Homo sapiens
HVDIRTLED

SEQ ID NO: 285 - protein, 9 aa, Homo sapiens
LLMGTLGIV

SEQ ID NO: 286 - protein, 12 aa, Homo sapiens
MHGDTPTLHEYM

SEQ ID NO: 287 - protein, 9 aa, Homo sapiens
TLGIVCPIC

SEQ ID NO: 288 - protein, 9 aa, Homo sapiens
TLHEYMLDL

SEQ ID NO: 289 - protein, 9 aa, Homo sapiens
YMLDLQPET

SEQ ID NO: 290 - protein, 10 aa, Homo sapiens
YMLDLQPETT

SEQ ID NO: 291 - protein, 18 aa, Homo sapiens
DLLMGTLGIVCPICSQKP

SEQ ID NO: 292 - protein, 20 aa, Homo sapiens
HYNIVTFCCKCDSTLRLCVQ

SEQ ID NO: 293 - protein, 20 aa, Homo sapiens
LRLCVQSTHVDIRTLEDLLM

SEQ ID NO: 294 - protein, 8 aa, Homo sapiens
CCKCDSTL

SEQ ID NO: 295 - protein, 15 aa, Homo sapiens
STHVDIRTLEDLLMG

SEQ ID NO: 296 - protein, 20 aa, Homo sapiens
CDSTLRLCVQSTHVDIRTLE

SEQ ID NO: 297 - protein, 9 aa, Homo sapiens
ATEVRTLQQ

SEQ ID NO: 298 - protein, 9 aa, Homo sapiens
CTIVCPSCA

SEQ ID NO: 299 - protein, 9 aa, Homo sapiens
LCINSTATE

SEQ ID NO: 300 - protein, 9 aa, Homo sapiens
CYEQLGDSS

SEQ ID NO: 301 - protein, 9 aa, Homo sapiens
ITIRCIICQ

SEQ ID NO: 302 - protein, 9 aa, Homo sapiens
KTLEERVKK

SEQ ID NO: 303 - protein, 9 aa, Homo sapiens
MRGDKATIK

SEQ ID NO: 304 - protein, 9 aa, Homo sapiens
PYGVCIMCL

SEQ ID NO: 305 - protein, 9 aa, Homo sapiens
QLGDSSDEE

SEQ ID NO: 306 - protein, 9 aa, Homo sapiens
RLQCVQCKK

SEQ ID NO: 307 - protein, 9 aa, Homo sapiens
VYKFLFTDL

SEQ ID NO: 308 - protein, 15 aa, Epstein-Barr virus
GGSKTSLYNLRRGTA

SEQ ID NO: 309 - protein, 11 aa, Epstein-Barr virus
HPVGEADYFEY

SEQ ID NO: 310 - protein, 15 aa, Epstein-Barr virus
RPSCIGCKGTHGGTG

SEQ ID NO: 311 - protein, 26 aa, Epstein-Barr virus
NPKFENIAEGLRALLARSHVERTTDE

SEQ ID NO: 312 - protein, 15 aa, Epstein-Barr virus
PGTGPGNGLGEKGDT

SEQ ID NO: 313 - protein, 15 aa, Epstein-Barr virus
PPMVEGAAAEGDDGD

SEQ ID NO: 314 - protein, 9 aa, Epstein-Barr virus
VLKDAIKDL

SEQ ID NO: 315 - protein, 15 aa, Epstein-Barr virus
YFMVFLQTHIFAEVL

SEQ ID NO: 316 - protein, 9 aa, Epstein-Barr virus
RLRAEAQVK

SEQ ID NO: 317 - protein, 9 aa, Epstein-Barr virus
RPPIFIRRL

SEQ ID NO: 318 - protein, 8 aa, Epstein-Barr virus
RYSIFFDY

SEQ ID NO: 319 - protein, 9 aa, Epstein-Barr virus
RYSIFFDYM

SEQ ID NO: 320 - protein, 9 aa, Epstein-Barr virus
VQPPQLTQV

SEQ ID NO: 321 - protein, 9 aa, Epstein-Barr virus
VSFIEFVGW

SEQ ID NO: 322 - protein, 9 aa, Epstein-Barr virus
RRIYDLIEL

SEQ ID NO: 323 - protein, 15 aa, Homo sapiens
VAGCYLKYKKKNSLS

SEQ ID NO: 324 - protein, 9 aa, Homo sapiens
DPKDAEKAI

SEQ ID NO: 325 - protein, 9 aa, Homo sapiens
GPFGAVNNV

SEQ ID NO: 326 - protein, 9 aa, Homo sapiens
KPSGATEPI

SEQ ID NO: 327 - protein, 9 aa, Homo sapiens
PPSACSPRF

SEQ ID NO: 328 - protein, 9 aa, Homo sapiens
SPRFSPITI

SEQ ID NO: 329 - protein, 15 aa, Homo sapiens
LADGEGGGTDEGIYD

SEQ ID NO: 330 - protein, 15 aa, Homo sapiens
YVVPPPARPCPTSGP

SEQ ID NO: 331 - protein, 15 aa, Homo sapiens
VLACGLSRIWGEERG

SEQ ID NO: 332 - protein, 14 aa, Homo sapiens
LDHILEPSIPWKSK

SEQ ID NO: 333 - protein, 21 aa, Homo sapiens
FTQEVSRLNINLHFSKCGFPF

SEQ ID NO: 334 - protein, 21 aa, Homo sapiens
GGYYSASYSDPCSLKCPYLGC

SEQ ID NO: 335 - protein, 15 aa, Homo sapiens
HILEPSIPWKSKLLT

SEQ ID NO: 336 - protein, 21 aa, Homo sapiens
LPFNWTHCFDPQIQAIVSSPC

SEQ ID NO: 337 - protein, 14 aa, Homo sapiens
SNLDHILEPSIPWK

SEQ ID NO: 338 - protein, 30 aa, Homo sapiens
SQLPPTAPPLLPHSNLDHILEPSIPWKSKL

SEQ ID NO: 339 - protein, 9 aa, Homo sapiens
GAGIGVAVL

SEQ ID NO: 340 - protein, 9 aa, Homo sapiens
IAGIGILAI

SEQ ID NO: 341 - protein, 9 aa, Homo sapiens
GIGIGSGQL

SEQ ID NO: 342 - protein, 20 aa, Epstein-Barr virus
VFLQTHIFAEVLKDAIKDLV

SEQ ID NO: 343 - protein, 9 aa, Homo sapiens
ELFQDLSQL

SEQ ID NO: 344 - protein, 9 aa, Homo sapiens
IGGIGTVPV

SEQ ID NO: 345 - protein, 10 aa, Homo sapiens
TMLARLVSDS

SEQ ID NO: 346 - protein, 9 aa, Homo sapiens
GTSSVIVSR

SEQ ID NO: 347 - protein, 10 aa, Homo sapiens
RINEFSISSF

SEQ ID NO: 348 - protein, 15 aa, Homo sapiens
DEVSMKGRPPPTPLF

SEQ ID NO: 349 - protein, 9 aa, Homo sapiens
YLCSGSSYF

SEQ ID NO: 350 - protein, 10 aa, Homo sapiens
YLCSGSSYFV

SEQ ID NO: 351 - protein, 9 aa, Homo sapiens
ALGIGAVPI

SEQ ID NO: 352 - protein, 9 aa, Homo sapiens
SQNPRFYHK

SEQ ID NO: 353 - protein, 9 aa, Homo sapiens
ALFDIESKV

SEQ ID NO: 354 - protein, 20 aa, Homo sapiens
MQLIPDDYSNTHSTRYVTVK

SEQ ID NO: 355 - protein, 9 aa, Homo sapiens
EYILSLEEL

SEQ ID NO: 356 - protein, 9 aa, Homo sapiens
FVGEFFTDV

SEQ ID NO: 357 - protein, 11 aa, Homo sapiens
AVYGQKEIHRK

SEQ ID NO: 358 - protein, 15 aa, Homo sapiens
KLVVVGAGGVGKSAL

SEQ ID NO: 359 - protein, 9 aa, Homo sapiens
VYLDKFIRL

SEQ ID NO: 360 - protein, 12 aa, Homo sapiens
FKQDLMIEDNLL

SEQ ID NO: 361 - protein, 15 aa, Homo sapiens
ALKIKGIHPYHSLSY

SEQ ID NO: 362 - protein, 15 aa, Homo sapiens
TPEPAIPPKATLWPA

SEQ ID NO: 363 - protein, 9 aa, Homo sapiens
LLDVAPLSL

SEQ ID NO: 364 - protein, 9 aa, Homo sapiens
LLLLDVAPL

SEQ ID NO: 365 - protein, 9 aa, Homo sapiens
TYLPTNASL

SEQ ID NO: 366 - protein, 9 aa, Homo sapiens
VLHDDLLEA

SEQ ID NO: 367 - protein, 8 aa, Homo sapiens
LEKQLIEL

SEQ ID NO: 368 - protein, 9 aa, Homo sapiens
SVSPVVHVR

SEQ ID NO: 369 - protein, 20 aa, Homo sapiens
DKKIEPRGPTIKPCPPCKCP

SEQ ID NO: 370 - protein, 14 aa, Homo sapiens
RGPTIKPCPPCKCP

SEQ ID NO: 371 - protein, 8 aa, Homo sapiens
LGIGVITI

SEQ ID NO: 372 - protein, 15 aa, Homo sapiens
GYGEMGSGYREDLGA

SEQ ID NO: 373 - protein, 9 aa, Homo sapiens
ETDPLTFNF

SEQ ID NO: 374 - protein, 20 aa, Homo sapiens
LQPYYGFSNQEVIEMVRKRQ

SEQ ID NO: 375 - protein, 9 aa, Homo sapiens
NKSQKPYKI

SEQ ID NO: 376 - protein, 9 aa, Homo sapiens
SLSASPVSN

SEQ ID NO: 377 - protein, 9 aa, Homo sapiens
TMIGTSSHL

SEQ ID NO: 378 - protein, 9 aa, Homo sapiens
VATNGKEVV

SEQ ID NO: 379 - protein, 10 aa, Homo sapiens
NLSALGIFST

SEQ ID NO: 380 - protein, 15 aa, Homo sapiens
EFESAQFPNWYISTS

SEQ ID NO: 381 - protein, 16 aa, Homo sapiens
YKAFSSLLASSAVSPE

SEQ ID NO: 382 - protein, 9 aa, Homo sapiens
LIGIGIAPL

SEQ ID NO: 383 - protein, 9 aa, Human herpesvirus 8
LVLILYLCV

SEQ ID NO: 384 - protein, 15 aa, Homo sapiens
LLDRGSFRNDGLKAS

SEQ ID NO: 385 - protein, 15 aa, Homo sapiens
ARVILGVRWYVETTS

SEQ ID NO: 386 - protein, 15 aa, Homo sapiens
CQGDSGGPLVCGDHL

SEQ ID NO: 387 - protein, 15 aa, Homo sapiens
KPVILGVRWYVETTS

SEQ ID NO: 388 - protein, 15 aa, Homo sapiens
SQLMLTRKAEAALRK

SEQ ID NO: 389 - protein, 15 aa, Homo sapiens
VPVAQVTTTSTTDAD

SEQ ID NO: 390 - protein, 15 aa, Homo sapiens
CRPQCCQSVCCQPTC

SEQ ID NO: 391 - protein, 15 aa, Homo sapiens
PRCCISSCCRPSCCV

SEQ ID NO: 392 - protein, 15 aa, Homo sapiens
SSGGGSSGGGYGGGS

SEQ ID NO: 393 - protein, 15 aa, Homo sapiens
TCCRTTCYRPSCCVS

SEQ ID NO: 394 - protein, 15 aa, Homo sapiens
AFTLLLYCELLQWED

SEQ ID NO: 395 - protein, 15 aa, Homo sapiens
ENKNQELRSLISQYQ

SEQ ID NO: 396 - protein, 12 aa, Homo sapiens
NVSFFHYPEYGY

SEQ ID NO: 397 - protein, 15 aa, Homo sapiens
RKFISLHRKALESDF

SEQ ID NO: 398 - protein, 9 aa, Homo sapiens
LQIEEEYQV

SEQ ID NO: 399 - protein, 9 aa, Homo sapiens
IHSMNSSIL

SEQ ID NO: 400 - protein, 9 aa, Homo sapiens
NVFPIFLQM

SEQ ID NO: 401 - protein, 9 aa, Homo sapiens
AVPDDLYIK

SEQ ID NO: 402 - protein, 9 aa, Homo sapiens
KYTFWEVNL

SEQ ID NO: 403 - protein, 9 aa, Homo sapiens
IHSMNSTIL

SEQ ID NO: 404 - protein, 15 aa, Homo sapiens
NLASSNYFPTPSGSM

SEQ ID NO: 405 - protein, 15 aa, Homo sapiens
PSGSMVTSDAQIFNK

SEQ ID NO: 406 - protein, 20 aa, Merkel cell polyomavirus
GNIPLMKAAFKRSCLKHHPD

SEQ ID NO: 407 - protein, 13 aa, Merkel cell polyomavirus
MDLVLNRKEREAL

SEQ ID NO: 408 - protein, 20 aa, Merkel cell polyomavirus
NSGRESSTPNGTSVPRNSSR

SEQ ID NO: 409 - protein, 13 aa, Merkel cell polyomavirus
PVIMMELNTLWSK

SEQ ID NO: 410 - protein, 13 aa, Merkel cell polyomavirus
TLWSKFQQNIHKL

SEQ ID NO: 411 - protein, 13 aa, Merkel cell polyomavirus
WEDLFCDESLSSP

SEQ ID NO: 412 - protein, 20 aa, Merkel cell polyomavirus
WEDLFCDESLSSPEPPSSSE

SEQ ID NO: 413 - protein, 9 aa, Homo sapiens
TSESQLFNK

SEQ ID NO: 414 - protein, 9 aa, Homo sapiens
YYYAGSSRL

SEQ ID NO: 415 - protein, 9 aa, Homo sapiens
LQFIFQLCK

SEQ ID NO: 416 - protein, 9 aa, Homo sapiens
MTLCAEVKK

SEQ ID NO: 417 - protein, 9 aa, Homo sapiens
QYRVFRIKL

SEQ ID NO: 418 - protein, 9 aa, Homo sapiens
YLLEMLWRL

SEQ ID NO: 419 - protein, 9 aa, Homo sapiens
YLQQNWWTL

SEQ ID NO: 420 - protein, 9 aa, Homo sapiens
ALLVLYSFA

SEQ ID NO: 421 - protein, 9 aa, Homo sapiens
CLGGLLTMV

SEQ ID NO: 422 - protein, 9 aa, Homo sapiens
GLGTLGAAL

SEQ ID NO: 423 - protein, 9 aa, Homo sapiens
LLSAWILTA

SEQ ID NO: 424 - protein, 9 aa, Homo sapiens
LLWTLVVLL

SEQ ID NO: 425 - protein, 9 aa, Homo sapiens
PYLFWLAAI

SEQ ID NO: 426 - protein, 9 aa, Homo sapiens
MGSLEMVPM

SEQ ID NO: 427 - protein, 9 aa, Homo sapiens
SLGGLLTMA

SEQ ID NO: 428 - protein, 9 aa, Homo sapiens
TYGPVFMSL

SEQ ID NO: 429 - protein, 11 aa, Homo sapiens
SSCSSCPLSKV

SEQ ID NO: 430 - protein, 15 aa, Homo sapiens
QKEKSLEFTKELPGY

SEQ ID NO: 431 - protein, 15 aa, Homo sapiens
PGESLRPRGERRLPQ

SEQ ID NO: 432 - protein, 15 aa, Homo sapiens
PGSGPQNRLGRYLEV

SEQ ID NO: 433 - protein, 9 aa, Homo sapiens
SSFGRGFFK

SEQ ID NO: 434 - protein, 20 aa, Epstein-Barr virus
AFFLDLILLIIALYLQQNWW

SEQ ID NO: 435 - protein, 20 aa, Epstein-Barr virus
ALLVLYSFALMLIIIILIIF

SEQ ID NO: 436 - protein, 20 aa, Epstein-Barr virus
CLLVLGIWIYLLEMLWRLGA

SEQ ID NO: 437 - protein, 20 aa, Epstein-Barr virus
DWTGGALLVLYSFALMLIII

SEQ ID NO: 438 - protein, 20 aa, Epstein-Barr virus
GALCILLLMITLLLIALWNL

SEQ ID NO: 439 - protein, 20 aa, Epstein-Barr virus
GIWIYLLEMLWRLGATIWQL

SEQ ID NO: 440 - protein, 20 aa, Epstein-Barr virus
GPRRPPRGPPLSSSLGLALL

SEQ ID NO: 441 - protein, 20 aa, Epstein-Barr virus
ILIIFIFRRDLLCPLGALCI

SEQ ID NO: 442 - protein, 20 aa, Epstein-Barr virus
LFLAILIWMYYHGQRHSDEH

SEQ ID NO: 443 - protein, 20 aa, Epstein-Barr virus
LILLIIALYLQQNWWTLLVD

SEQ ID NO: 444 - protein, 20 aa, Epstein-Barr virus
LLFWLYIVMSDWTGGALLVL

SEQ ID NO: 445 - protein, 20 aa, Epstein-Barr virus
LLLMITLLLIALWNLHGQAL

SEQ ID NO: 446 - protein, 20 aa, Epstein-Barr virus
LLWLLLFLAILIWMYYHGQR

SEQ ID NO: 447 - protein, 20 aa, Epstein-Barr virus
LSSSLGLALLLLLLALLFWL

SEQ ID NO: 448 - protein, 20 aa, Epstein-Barr virus
NDGGPPQLTEEVENKGGDQG

SEQ ID NO: 449 - protein, 20 aa, Epstein-Barr virus
PRGPPLSSSLGLALLLLLLA

SEQ ID NO: 450 - protein, 20 aa, Epstein-Barr virus
QQNWWTLLVDLLWLLLFLAI

SEQ ID NO: 451 - protein, 20 aa, Epstein-Barr virus
YHGQRHSDEHHHDDSLPHPQ

SEQ ID NO: 452 - protein, 20 aa, Epstein-Barr virus
YIVMSDWTGGALLVLYSFAL

SEQ ID NO: 453 - protein, 20 aa, Epstein-Barr virus
YSFALMLIIIILIIFIFRRD

SEQ ID NO: 454 - protein, 15 aa, Homo sapiens
PSHQPPASTLSPNPT

SEQ ID NO: 455 - protein, 10 aa, Homo sapiens
RYCNLEGPPI

SEQ ID NO: 456 - protein, 19 aa, Homo sapiens
YMASWVMLGITYRNKSLMW

SEQ ID NO: 457 - protein, 10 aa, Homo sapiens
SPRPPLGSSL

SEQ ID NO: 458 - protein, 15 aa, Homo sapiens
DEMDCPLSPTPPLCS

SEQ ID NO: 459 - protein, 9 aa, Homo sapiens
FLNQTDETL

SEQ ID NO: 460 - protein, 9 aa, Homo sapiens
KLLMVLMLA

SEQ ID NO: 461 - protein, 10 aa, Homo sapiens
LIYDSSLCDL

SEQ ID NO: 462 - protein, 9 aa, Homo sapiens
LMVLMLAAL

SEQ ID NO: 463 - protein, 9 aa, Homo sapiens
TINPQVSKT

SEQ ID NO: 464 - protein, 15 aa, Homo sapiens
LWHLQGPKDLMLKLR

SEQ ID NO: 465 - protein, 9 aa, Homo sapiens
YLEKESIYY

SEQ ID NO: 466 - protein, 9 aa, Homo sapiens
GILGFVFTL

SEQ ID NO: 467 - protein, 9 aa, Homo sapiens
RLEDVFAGK

SEQ ID NO: 468 - protein, 15 aa, Homo sapiens
VMMHGGPPHPGMPMS

SEQ ID NO: 469 - protein, 9 aa, Homo sapiens
ALLAVGATK

SEQ ID NO: 470 - protein, 9 aa, Homo sapiens
ITDQVPFSV

SEQ ID NO: 471 - protein, 16 aa, Homo sapiens
WNRQLYPEWTEAQRLD

SEQ ID NO: 472 - protein, 9 aa, Homo sapiens
YLEPGPVTA

SEQ ID NO: 473 - protein, 15 aa, Homo sapiens
NRQLYPEWTEAQRLD

SEQ ID NO: 474 - protein, 13 aa, Homo sapiens
NRQLYPEWTEAQR

SEQ ID NO: 475 - protein, 18 aa, Homo sapiens
RTKAWNRQLYPEWTEAQR

SEQ ID NO: 476 - protein, 14 aa, Homo sapiens
WNRQLYPEWTEAQR

SEQ ID NO: 477 - protein, 9 aa, Homo sapiens
RYGSFSVTL

SEQ ID NO: 478 - protein, 20 aa, Homo sapiens
ASSIMSTESITGSLGPLLDG

SEQ ID NO: 479 - protein, 11 aa, Homo sapiens
ESITGSLGPLL

SEQ ID NO: 480 - protein, 9 aa, Homo sapiens
HRRGSRSYV

SEQ ID NO: 481 - protein, 20 aa, Homo sapiens
STESITGSLGPLLDGTATLR

SEQ ID NO: 482 - protein, 20 aa, Homo sapiens
THTMEVTVYHRRGSRSYVPL

SEQ ID NO: 483 - protein, 20 aa, Homo sapiens
VLYRYGSFSVTLDIVQGIES

SEQ ID NO: 484 - protein, 20 aa, Homo sapiens
VPLDCVLYRYGSFSVTLDIV

SEQ ID NO: 485 - protein, 20 aa, Homo sapiens
VTVYHRRGSRSYVPLAHSSS

SEQ ID NO: 486 - protein, 10 aa, Homo sapiens
AMLGTHTMEV

SEQ ID NO: 487 - protein, 10 aa, Homo sapiens
ALYVDSLFFL

SEQ ID NO: 488 - protein, 9 aa, Homo sapiens
SQLTTLSFY

SEQ ID NO: 489 - protein, 9 aa, Homo sapiens
AAGIGILTV

SEQ ID NO: 490 - protein, 10 aa, Homo sapiens
EAAGIGILTV

SEQ ID NO: 491 - protein, 9 aa, Homo sapiens
ILTVILGVL

SEQ ID NO: 492 - protein, 23 aa, Homo sapiens
RNGYRALMDKSLHVGTQCALTRR

SEQ ID NO: 493 - protein, 12 aa, Homo sapiens
APPAYEKLSAEQ

SEQ ID NO: 494 - protein, 15 aa, Homo sapiens
APPAYEKLSAEQSPP

SEQ ID NO: 495 - protein, 15 aa, Homo sapiens
APPAYEKLSAEQSPP

SEQ ID NO: 496 - protein, 17 aa, Homo sapiens
APPAYEKLSAEQSPPPY

SEQ ID NO: 497 - protein, 12 aa, Homo sapiens
NAPPAYEKLSAE

SEQ ID NO: 498 - protein, 20 aa, Homo sapiens
VPNAPPAYEKLSAEQSPPPY

SEQ ID NO: 499 - protein, 9 aa, Homo sapiens
EEAAGIGIL

SEQ ID NO: 500 - protein, 20 aa, Homo sapiens
GHGHSYTTAEEAAGIGILTV

SEQ ID NO: 501 - protein, 20 aa, Homo sapiens
YTTAEEAAGIGILTVILGVL

SEQ ID NO: 502 - protein, 9 aa, Homo sapiens
EADPTGHSY

SEQ ID NO: 503 - protein, 9 aa, Homo sapiens
RVRFFFPSL

SEQ ID NO: 504 - protein, 9 aa, Homo sapiens
EVDPIGHLY

SEQ ID NO: 505 - protein, 9 aa, Homo sapiens
FLWGPRALV

SEQ ID NO: 506 - protein, 10 aa, Homo sapiens
MEVDPIGHLY

SEQ ID NO: 507 - protein, 9 aa, Homo sapiens
EVDPIGHVY

SEQ ID NO: 508 - protein, 10 aa, Homo sapiens
LLFGLALIEV

SEQ ID NO: 509 - protein, 8 aa, Homo sapiens
CPLSKILL

SEQ ID NO: 510 - protein, 8 aa, Homo sapiens
FLYALALL

SEQ ID NO: 511 - protein, 9 aa, Homo sapiens
FLYALALLL

SEQ ID NO: 512 - protein, 17 aa, Homo sapiens
GGSILQTNFKSLSSTEF

SEQ ID NO: 513 - protein, 9 aa, Homo sapiens
IEDPPFNSL

SEQ ID NO: 514 - protein, 8 aa, Homo sapiens
LLWTLVVL

SEQ ID NO: 515 - protein, 9 aa, Homo sapiens
LTAGFLIFL

SEQ ID NO: 516 - protein, 8 aa, Homo sapiens
PYLFWLAA

SEQ ID NO: 517 - protein, 9 aa, Homo sapiens
RRRWRRLTV

SEQ ID NO: 518 - protein, 10 aa, Homo sapiens
SSCSSCPLSK

SEQ ID NO: 519 - protein, 11 aa, Homo sapiens
SSCSSCPLSKI

SEQ ID NO: 520 - protein, 9 aa, Homo sapiens
TYGPVFMCL

SEQ ID NO: 521 - protein, 10 aa, Homo sapiens
VMSNTLLSAW

SEQ ID NO: 522 - protein, 9 aa, Human gammaherpesvirus 4
VTLAHAGYY

SEQ ID NO: 523 - protein, 15 aa, Homo sapiens
PFSPSHPAPPSDPSH

SEQ ID NO: 524 - protein, 9 aa, Homo sapiens
ALGIGVYPV

SEQ ID NO: 525 - protein, 15 aa, Homo sapiens
VNTTTSPVNTTTSPV

SEQ ID NO: 526 - protein, 15 aa, Homo sapiens
RTDLVKSELLHIESQ

SEQ ID NO: 527 - protein, 9 aa, bacterium JGI 053
ALGLGLLPV

SEQ ID NO: 528 - protein, 15 aa, Homo sapiens
DILEQARAAVDTYCR

SEQ ID NO: 529 - protein, 19 aa, Homo sapiens
HSLRYFRLGVSDPIRGVPE

SEQ ID NO: 530 - protein, 15 aa, Homo sapiens
KDQGPIVPAPVKGEG

SEQ ID NO: 531 - protein, 15 aa, Homo sapiens
VKDQGPMVSAPVKDQ

SEQ ID NO: 532 - protein, 9 aa, Homo sapiens
RASHPIVQK

SEQ ID NO: 533 - protein, 9 aa, Homo sapiens
LLSAVLPSV

SEQ ID NO: 534 - protein, 15 aa, Homo sapiens
AQGWSTVARFQITAT

SEQ ID NO: 535 - protein, 25 aa, Homo sapiens
NTVFGAERKKRLSIIGPTSRDRSSP

SEQ ID NO: 536 - protein, 14 aa, Homo sapiens
MSYDYHQNWGRDGG

SEQ ID NO: 537 - protein, 14 aa, Homo sapiens
LNKVTIDARHRLPL

SEQ ID NO: 538 - protein, 19 aa, Homo sapiens
HGNSSIIADQIALKLVGPE

SEQ ID NO: 539 - protein, 15 aa, Homo sapiens
TTTASTEGSETTTAS

SEQ ID NO: 540 - protein, 9 aa, Homo sapiens
STAPPVHNV

SEQ ID NO: 541 - protein, 9 aa, Homo sapiens
LLLLTVLTV

SEQ ID NO: 542 - protein, 15 aa, Homo sapiens
FASPGDDGDGRAEGF

SEQ ID NO: 543 - protein, 9 aa, Pseudomonas
LAGIGLIAA

SEQ ID NO: 544 - protein, 9 aa, Homo sapiens
LGGLGLFFA

SEQ ID NO: 545 - protein, 9 aa, Homo sapiens
VLQELNVTV

SEQ ID NO: 546 - protein, 15 aa, Homo sapiens
EHSQETESLREALLS

SEQ ID NO: 547 - protein, 9 aa, Homo sapiens
YIGEVLVSV

SEQ ID NO: 548 - protein, 9 aa, Homo sapiens
FLIIILDHL

SEQ ID NO: 549 - protein, 15 aa, Homo sapiens
KLSVAPSEVLEEDQV

SEQ ID NO: 550 - protein, 15 aa, Homo sapiens
NQLKERSFAQLISKD

SEQ ID NO: 551 - protein, 15 aa, Homo sapiens
YVSMMCNEQAYSLAV

SEQ ID NO: 552 - protein, 10 aa, Homo sapiens
FLKGIGWIPI

SEQ ID NO: 553 - protein, 15 aa, Homo sapiens
LRPQLAENKQQFRNL

SEQ ID NO: 554 - protein, 15 aa, Homo sapiens
EKKQQFRNLKEKCFL

SEQ ID NO: 555 - protein, 11 aa, Homo sapiens
KALRLSASALF

SEQ ID NO: 556 - protein, 15 aa, Homo sapiens
AFMYAKKEEWKKAEE

SEQ ID NO: 557 - protein, 9 aa, Homo sapiens
TMLDIQPED

SEQ ID NO: 558 - protein, 15 aa, Epstein-Barr virus
GVFVYGGSKTSLYNL

SEQ ID NO: 559 - protein, 9 aa, Epstein-Barr virus
FLRGRAYGL

SEQ ID NO: 560 - protein, 11 aa, Homo sapiens
KLKKKQVNVFA

SEQ ID NO: 561 - protein, 9 aa, Homo sapiens
ILRGSVAHK

SEQ ID NO: 562 - protein, 9 aa, Homo sapiens
VYGIRLEHF

SEQ ID NO: 563 - protein, 14 aa, Homo sapiens
SLLMWITQCFLPVF

SEQ ID NO: 564 - protein, 20 aa, Homo sapiens
YLAMPFATPMEAELARRSLA

SEQ ID NO: 565 - protein, 9 aa, Homo sapiens
LAMPFATPM

SEQ ID NO: 566 - protein, 9 aa, Homo sapiens
MPFATPMEA

SEQ ID NO: 567 - protein, 11 aa, Homo sapiens
MPFATPMEAEL

SEQ ID NO: 568 - protein, 12 aa, Homo sapiens
PFATPMEAELAR

SEQ ID NO: 569 - protein, 33 aa, Homo sapiens
QDAPPLPVPGVLLKEFTVSGNILTIRLTAADHR

SEQ ID NO: 570 - protein, 15 aa, Homo sapiens
ILLIHCDAHLHTPMY

SEQ ID NO: 571 - protein, 15 aa, Homo sapiens
LLIHCDAHLHTPMYF

SEQ ID NO: 572 - protein, 10 aa, Homo sapiens
ACDPHSGHFV

SEQ ID NO: 573 - protein, 13 aa, Homo sapiens
LFMDTLSFVCPLC

SEQ ID NO: 574 - protein, 9 aa, Homo sapiens
IGLITVLFL

SEQ ID NO: 575 - protein, 15 aa, Homo sapiens
GRNSFEVRVCACPGR

SEQ ID NO: 576 - protein, 11 aa, Homo sapiens
GLAPPQHLIRV

SEQ ID NO: 577 - protein, 9 aa, Homo sapiens
KTCPVQLWV

SEQ ID NO: 578 - protein, 9 aa, Homo sapiens
LLGRNSFEV

SEQ ID NO: 579 - protein, 9 aa, Homo sapiens
RMPEAAPPV

SEQ ID NO: 580 - protein, 9 aa, Homo sapiens
YQGSYGFRL

SEQ ID NO: 581 - protein, 9 aa, Homo sapiens
YLLPAIVHI

SEQ ID NO: 582 - protein, 10 aa, Homo sapiens
QLLDGFMITL

SEQ ID NO: 583 - protein, 9 aa, Homo sapiens
YLVGNVCIL

SEQ ID NO: 584 - protein, 11 aa, Homo sapiens
STMPHTSGMNR

SEQ ID NO: 585 - protein, 15 aa, Homo sapiens
GRKFAAWAPPSFSQT

SEQ ID NO: 586 - protein, 9 aa, Homo sapiens
GMMRWCMPV

SEQ ID NO: 587 - protein, 15 aa, Homo sapiens
AVVFQDSVVFRVAPW

SEQ ID NO: 588 - protein, 9 aa, Homo sapiens
TSALPIIQK

SEQ ID NO: 589 - protein, 9 aa, Homo sapiens
DQYPYLKSV

SEQ ID NO: 590 - protein, 9 aa, Homo sapiens
IARNLTQQL

SEQ ID NO: 591 - protein, 12 aa, Homo sapiens
SLLTSSKGQLQK

SEQ ID NO: 592 - protein, 15 aa, Homo sapiens
TGAMNVAKGTIQTGV

SEQ ID NO: 593 - protein, 12 aa, Homo sapiens
ATAGDGLIELRK

SEQ ID NO: 594 - protein, 9 aa, Homo sapiens
GSSDVIIHR

SEQ ID NO: 595 - protein, 15 aa, Homo sapiens
PYGCLPTGDRTGLIE

SEQ ID NO: 596 - protein, 12 aa, Homo sapiens
SRSSSAELDRSR

SEQ ID NO: 597 - protein, 9 aa, Homo sapiens
ALGIGIYSL

SEQ ID NO: 598 - protein, 9 aa, Homo sapiens
KTWGQYWQV

SEQ ID NO: 599 - protein, 10 aa, Homo sapiens
SIFDGRVVAK

SEQ ID NO: 600 - protein, 9 aa, Homo sapiens
DLDVKKMPL

SEQ ID NO: 601 - protein, 15 aa, Homo sapiens
SKMGKWCRHCFPCCR

SEQ ID NO: 602 - protein, 15 aa, Homo sapiens
CRGSGKSNVGTSGDH

SEQ ID NO: 603 - protein, 15 aa, Homo sapiens
SKMGKWCRHCFAWCR

SEQ ID NO: 604 - protein, 9 aa, Homo sapiens
TRATKMQVI

SEQ ID NO: 605 - protein, 9 aa, Homo sapiens
VYALPLKML

SEQ ID NO: 606 - protein, 11 aa, Homo sapiens
YSEHPTFTSQY

SEQ ID NO: 607 - protein, 11 aa, Homo sapiens
AVQEFGLARFK

SEQ ID NO: 608 - protein, 15 aa, Homo sapiens
GEPIPQPARLRYVTS

SEQ ID NO: 609 - protein, 15 aa, Homo sapiens
EMQEERLKLPILSEE

SEQ ID NO: 610 - protein, 9 aa, Homo sapiens
VMLEGEQEE

SEQ ID NO: 611 - protein, 9 aa, Homo sapiens
HIGIGLLSL

SEQ ID NO: 612 - protein, 9 aa, Homo sapiens
ISEYRHYCY

SEQ ID NO: 613 - protein, 9 aa, Homo sapiens
KLPDLCTEL

SEQ ID NO: 614 - protein, 9 aa, Homo sapiens
KLPQLCTEL

SEQ ID NO: 615 - protein, 10 aa, Homo sapiens
TIHDIILECV

SEQ ID NO: 616 - protein, 9 aa, Homo sapiens
VYDFAFRDL

SEQ ID NO: 617 - protein, 32 aa, Homo sapiens
DKKQRFHNIRGRWTGRCMSCCRSSRTRRETQL

SEQ ID NO: 618 - protein, 33 aa, Homo sapiens
FRDLCIVYRDGNPYAVCDKCLKFYSKISEYRHY

SEQ ID NO: 619 - protein, 32 aa, Homo sapiens
KLPQLCTELQTTIHDIILECVYCKQQLLRREV

SEQ ID NO: 620 - protein, 33 aa, Homo sapiens
MHQKRTAMFQDPQERPRKLPQLCTELQTTIHDI

SEQ ID NO: 621 - protein, 32 aa, Homo sapiens
RCINCQKPLCPEEKQRHLDKKQRFHNIRGRWT

SEQ ID NO: 622 - protein, 15 aa, Homo sapiens
EKQRHLDKKQRFHNI

SEQ ID NO: 623 - protein, 32 aa, Homo sapiens
CVYCKQQLLRREVYDFAFRDLCIVYRDGNPYA

SEQ ID NO: 624 - protein, 15 aa, Homo sapiens
ELQTTIHDIILECVY

SEQ ID NO: 625 - protein, 32 aa, Homo sapiens
RDLCIVYRDGNPYAVCDKCLKFYSKISEYRHY

SEQ ID NO: 626 - protein, 15 aa, Homo sapiens
VYDFAFRDLCIVYRD

SEQ ID NO: 627 - protein, 10 aa, Homo sapiens
FAFKDLCIVY

SEQ ID NO: 628 - protein, 10 aa, Homo sapiens
FAFSDLYVVY

SEQ ID NO: 629 - protein, 10 aa, Homo sapiens
FVFADLRIVY

SEQ ID NO: 630 - protein, 10 aa, Homo sapiens
VAFTEIKIVY

SEQ ID NO: 631 - protein, 22 aa, Homo sapiens
DFAFRDLCIVYRDGNPYAVCDK

SEQ ID NO: 632 - protein, 22 aa, Homo sapiens
DKCLKFYSKISEYRHYCYSLYG

SEQ ID NO: 633 - protein, 22 aa, Homo sapiens
DPQERPRKLPQLCTELQTTIHD

SEQ ID NO: 634 - protein, 22 aa, Homo sapiens
HDIILECVYCKQQLLRREVYDF

SEQ ID NO: 635 - protein, 22 aa, Homo sapiens
KQQLLRREVYDFAFRDLCIVYR

SEQ ID NO: 636 - protein, 22 aa, Homo sapiens
RFHNIRGRWTGRCMSCCRSSRT

SEQ ID NO: 637 - protein, 22 aa, Homo sapiens
YRDGNPYAVCDKCLKFYSKISE

SEQ ID NO: 638 - protein, 33 aa, Homo sapiens
CLKFYSKISEYRHYCYSLYGTTLEQQYNKPLCD

SEQ ID NO: 639 - protein, 22 aa, Homo sapiens
DLFVVYRDSIPHAACHKCIDFY

SEQ ID NO: 640 - protein, 22 aa, Homo sapiens
FYSRIRELRHYSDSVYGDTLEK

SEQ ID NO: 641 - protein, 22 aa, Homo sapiens
GTTLEQQYNKPLCDLLIRCINC

SEQ ID NO: 642 - protein, 22 aa, Homo sapiens
KQRHLDKKQRFHNIRGRWTGRC

SEQ ID NO: 643 - protein, 22 aa, Homo sapiens
PLCDLLIRCINCQKPLCPEEKQ

SEQ ID NO: 644 - protein, 10 aa, Homo sapiens
QERPRKLPQL

SEQ ID NO: 645 - protein, 10 aa, Homo sapiens
QRFHNIRGRW

SEQ ID NO: 646 - protein, 10 aa, Homo sapiens
RWTGRCMSCC

SEQ ID NO: 647 - protein, 10 aa, Homo sapiens
SSRTRRETQL

SEQ ID NO: 648 - protein, 15 aa, Homo sapiens
AFRDLCIVYRDGNPY

SEQ ID NO: 649 - protein, 15 aa, Homo sapiens
HLDKKQRFHNIRGRW

SEQ ID NO: 650 - protein, 11 aa, Homo sapiens
FAFRDLCIVYR

SEQ ID NO: 651 - protein, 9 aa, Homo sapiens
MLDLQPETT

SEQ ID NO: 652 - protein, 10 aa, Homo sapiens
YILDLQPETT

SEQ ID NO: 653 - protein, 10 aa, Homo sapiens
YVLDLQPEAT

SEQ ID NO: 654 - protein, 20 aa, Homo sapiens
LEDLLMGTLGIVCPICSQKP

SEQ ID NO: 655 - protein, 9 aa, Homo sapiens
FQQLFLNTL

SEQ ID NO: 656 - protein, 10 aa, Homo sapiens
QLFLNTLSFV

SEQ ID NO: 657 - protein, 15 aa, Homo sapiens
ASDLRTIQQLLMGTV

SEQ ID NO: 658 - protein, 15 aa, Homo sapiens
LRTIQQLLMGTVNIV

SEQ ID NO: 659 - protein, 15 aa, Homo sapiens
MHGDTPTLHEYMLDL

SEQ ID NO: 660 - protein, 15 aa, Homo sapiens
HVDIRTLEDLLMGTL

SEQ ID NO: 661 - protein, 22 aa, Homo sapiens
DLYCYEQLNDSSEEEDEIDGPA

SEQ ID NO: 662 - protein, 22 aa, Homo sapiens
HYNIVTFCCKCDSTLRLCVQST

SEQ ID NO: 663 - protein, 22 aa, Homo sapiens
IPVDLLCHEQLSDSEEENDEID

SEQ ID NO: 664 - protein, 11 aa, Homo sapiens
IRTLEDLLMGT

SEQ ID NO: 665 - protein, 22 aa, Homo sapiens
MHGPKATLQDIVLHLEPQNEIP

SEQ ID NO: 666 - protein, 15 aa, Homo sapiens
TPTLHEYMLDLQPET

SEQ ID NO: 667 - protein, 15 aa, Homo sapiens
EMSALLARRRRIAEK

SEQ ID NO: 668 - protein, 11 aa, Homo sapiens
RVQEAVESMVK

SEQ ID NO: 669 - protein, 10 aa, Homo sapiens
RYYVGHKGKF

SEQ ID NO: 670 - protein, 15 aa, Homo sapiens
KIFYVYMKRKYEAMT

SEQ ID NO: 671 - protein, 9 aa, Homo sapiens
KASEKIFYV

SEQ ID NO: 672 - protein, 11 aa, Homo sapiens
ATFSSSHRYHK

SEQ ID NO: 673 - protein, 9 aa, Homo sapiens
LLHGFSFHL

SEQ ID NO: 674 - protein, 9 aa, Homo sapiens
ETDPVNHMV

SEQ ID NO: 675 - protein, 15 aa, Homo sapiens
GINQTTGALYLRVDS

SEQ ID NO: 676 - protein, 9 aa, Homo sapiens
GLGIGIASM

SEQ ID NO: 677 - protein, 9 aa, Homo sapiens
ALLKDTVYT

SEQ ID NO: 678 - protein, 15 aa, Homo sapiens
NLVHGPPAPPQVGAD

SEQ ID NO: 679 - protein, 9 aa, Homo sapiens
ALYSGVHKK

SEQ ID NO: 680 - protein, 15 aa, Homo sapiens
QLLEGLGFTLTVVPE

SEQ ID NO: 681 - protein, 13 aa, Homo sapiens
EFPVRQAAAIYLK

SEQ ID NO: 682 - protein, 15 aa, Homo sapiens
GGGPDGPLYKVSVTA

SEQ ID NO: 683 - protein, 9 aa, Homo sapiens
AAANIIRTL

SEQ ID NO: 684 - protein, 9 aa, Homo sapiens
LGVIGLVAL

SEQ ID NO: 685 - protein, 9 aa, Homo sapiens
IISAVVGIL

SEQ ID NO: 686 - protein, 18 aa, Homo sapiens
KIFGSLAFLPESFDGDPA

SEQ ID NO: 687 - protein, 10 aa, Homo sapiens
HPAATHTKAV

SEQ ID NO: 688 - protein, 9 aa, Homo sapiens
QIKVRVDMV

SEQ ID NO: 689 - protein, 10 aa, Homo sapiens
TLLQQYCLYL

SEQ ID NO: 690 - protein, 15 aa, Homo sapiens
KSEGEEAQEVEGETQ

SEQ ID NO: 691 - protein, 9 aa, Homo sapiens
SSLSLFFRK

SEQ ID NO: 692 - protein, 15 aa, Homo sapiens
VRRCLPLCALTLEAA

SEQ ID NO: 693 - protein, 9 aa, Homo sapiens
RTNWPNTGK

SEQ ID NO: 694 - protein, 9 aa, Homo sapiens
GRAPQVLVL

SEQ ID NO: 695 - protein, 15 aa, Homo sapiens
TYSPTSPVYTPTSPK

SEQ ID NO: 696 - protein, 15 aa, Homo sapiens
GGHDSSSWSHRYGGG

SEQ ID NO: 697 - protein, 15 aa, Homo sapiens
DPSAIGLADPPIPSP

SEQ ID NO: 698 - protein, 15 aa, Homo sapiens
AVYTPPSVSTHQMPR

SEQ ID NO: 699 - protein, 15 aa, Homo sapiens
GRLILWEAPPLGAGG

SEQ ID NO: 700 - protein, 15 aa, Homo sapiens
SIYNNLVSFASPLVT

SEQ ID NO: 701 - protein, 11 aa, Homo sapiens
LLLELAGVTHV

SEQ ID NO: 702 - protein, 9 aa, Homo sapiens
NLKLKLHSF

SEQ ID NO: 703 - protein, 15 aa, Homo sapiens
TRLFPNEFANFYNAV

SEQ ID NO: 704 - protein, 20 aa, Merkel cell polyomavirus
CISCKLSRQHCSLKTLKQKN

SEQ ID NO: 705 - protein, 9 aa, Homo sapiens
KLGIGFAKA

SEQ ID NO: 706 - protein, 10 aa, Homo sapiens
FLQEVNVYGV

SEQ ID NO: 707 - protein, 9 aa, Homo sapiens
LIGIGLNLV

SEQ ID NO: 708 - protein, 16 aa, Homo sapiens
IEELRHLWDLLLELTL

SEQ ID NO: 709 - protein, 15 aa, Homo sapiens
KELRALRKMVSNMSG

SEQ ID NO: 710 - protein, 10 aa, Homo sapiens
YTCPLCRAPV

SEQ ID NO: 711 - protein, 9 aa, Homo sapiens
IMLEGETKL

SEQ ID NO: 712 - protein, 15 aa, Homo sapiens
QQEIDQKRLEFEKQK

SEQ ID NO: 713 - protein, 15 aa, Homo sapiens
AGRFGQGAHHAAGQA

SEQ ID NO: 714 - protein, 9 aa, Homo sapiens
RLFVGSIPK

SEQ ID NO: 715 - protein, 9 aa, Homo sapiens
GYDQIMPKK

SEQ ID NO: 716 - protein, 9 aa, Homo sapiens
APLQRSQSL

SEQ ID NO: 717 - protein, 15 aa, Homo sapiens
EPGDTALYLCASSQS

SEQ ID NO: 718 - protein, 11 aa, Homo sapiens
ALLTSRLRFIP

SEQ ID NO: 719 - protein, 16 aa, Homo sapiens
EARPALLTSRLRFIPK

SEQ ID NO: 720 - protein, 8 aa, Homo sapiens
LLTSRLRF

SEQ ID NO: 721 - protein, 9 aa, Homo sapiens
LLTSRLRFI

SEQ ID NO: 722 - protein, 12 aa, Homo sapiens
RPALLTSRLRFI

SEQ ID NO: 723 - protein, 9 aa, Homo sapiens
GTADVHFER

SEQ ID NO: 724 - protein, 9 aa, Homo sapiens
ASFDKAKLK

SEQ ID NO: 725 - protein, 15 aa, Homo sapiens
PTKCEVERFTATSFG

SEQ ID NO: 726 - protein, 9 aa, Homo sapiens
ESDPIVAQY

SEQ ID NO: 727 - protein, 9 aa, Homo sapiens
SILEDPPSI

SEQ ID NO: 728 - protein, 15 aa, Homo sapiens
GDCVQGDWCPISGGL

SEQ ID NO: 729 - protein, 15 aa, Homo sapiens
ISGGLCSARLHRHAL

SEQ ID NO: 730 - protein, 9 aa, Homo sapiens
LLFGYPVYV

SEQ ID NO: 731 - protein, 9 aa, Homo sapiens
SFHSLHLLF

SEQ ID NO: 732 - protein, 15 aa, Homo sapiens
VVCMYLYQLSPPITW

SEQ ID NO: 733 - protein, 15 aa, Homo sapiens
AGQNPASHPPPDDAE

SEQ ID NO: 734 - protein, 14 aa, Homo sapiens
RVEYHFLSPYVSPK

SEQ ID NO: 735 - protein, 13 aa, Homo sapiens
NSVIIVDKNGRLV

SEQ ID NO: 736 - protein, 10 aa, Homo sapiens
ILLGIGIYAL

SEQ ID NO: 737 - protein, 9 aa, Homo sapiens
LLGIGIYAL

SEQ ID NO: 738 - protein, 15 aa, Homo sapiens
IHSSWDCGLFTNYSA

SEQ ID NO: 739 - protein, 9 aa, Homo sapiens
QLLDQVEQI

SEQ ID NO: 740 - protein, 15 aa, Homo sapiens
IMASKGMRHFCLISE

SEQ ID NO: 741 - protein, 9 aa, Homo sapiens
MRHFCLISE

SEQ ID NO: 742 - protein, 9 aa, Homo sapiens
IAGLGLLTV

SEQ ID NO: 743 - protein, 15 aa, Homo sapiens
GELIGTLNAAKVPAD

SEQ ID NO: 744 - protein, 9 aa, Homo sapiens
QVATEGLAK

SEQ ID NO: 745 - protein, 9 aa, Homo sapiens
RLARLALVL

SEQ ID NO: 746 - protein, 20 aa, Merkel cell polyomavirus
PNGTSVPRNSSRTYGTWEDL

SEQ ID NO: 747 - protein, 9 aa, Homo sapiens
MRETSGFTL

SEQ ID NO: 748 - protein, 11 aa, Homo sapiens
AVFDGAQVTSK

SEQ ID NO: 749 - protein, 9 aa, Homo sapiens
YMDGTMSQV

SEQ ID NO: 750 - protein, 9 aa, Homo sapiens
MLLAVLYCL

SEQ ID NO: 751 - protein, 9 aa, Homo sapiens
YMNGTMSQV

SEQ ID NO: 752 - protein, 9 aa, Homo sapiens
FQDYIKSYL

SEQ ID NO: 753 - protein, 9 aa, Homo sapiens
SVYDFFVWL

SEQ ID NO: 754 - protein, 15 aa, Homo sapiens
PKPVLHMVSSEQHSA

SEQ ID NO: 755 - protein, 9 aa, Homo sapiens
YLAPENGYL

SEQ ID NO: 756 - protein, 9 aa, Homo sapiens
KMGIGWKPL

SEQ ID NO: 757 - protein, 9 aa, Homo sapiens
HYYVSMDAL

SEQ ID NO: 758 - protein, 10 aa, Homo sapiens
KYKDRTNILF

SEQ ID NO: 759 - protein, 10 aa, Homo sapiens
RLPSSADVEF

SEQ ID NO: 760 - protein, 9 aa, Homo sapiens
RYNADISTF

SEQ ID NO: 761 - protein, 19 aa, Homo sapiens
QEEKSLDPMVYMNDTSPLT

SEQ ID NO: 762 - protein, 15 aa, Homo sapiens
TCSCQSSGTSSTSYS

SEQ ID NO: 763 - protein, 16 aa, Homo sapiens
TIYSLFYSVADRDAPA

SEQ ID NO: 764 - protein, 13 aa, Homo sapiens
GAIVIERPNVKWS

SEQ ID NO: 765 - protein, 17 aa, Homo sapiens
DIMRVNVDKVLERDQKL

SEQ ID NO: 766 - protein, 17 aa, Homo sapiens
VDKVLERDQKLSELDDR

SEQ ID NO: 767 - protein, 9 aa, Homo sapiens
SSVPGVRLL

SEQ ID NO: 768 - protein, 7 aa, Homo sapiens
NYIDKVR

SEQ ID NO: 769 - protein, 9 aa, Homo sapiens
CQWGRLWQL

SEQ ID NO: 770 - protein, 10 aa, Homo sapiens
MCQWGRLWQL

SEQ ID NO: 771 - protein, 9 aa, Homo sapiens
CMTWNQMNL

SEQ ID NO: 772 - protein, 9 aa, Homo sapiens
RMFPNAPYL

SEQ ID NO: 773 - protein, 15 aa, Homo sapiens
SGSGSGPLPSLFLNS

SEQ ID NO: 774 - protein, 15 aa, Homo sapiens
LTDHRAHRCPGGNAK

SEQ ID NO: 775 - protein, 15 aa, Homo sapiens
QLTAHKMIHTGEKPY

SEQ ID NO: 776 - protein, 15 aa, Homo sapiens
ECSECGKVFLESAAL

SEQ ID NO: 777 - protein, 15 aa, Homo sapiens
EECGKAFSVFSTLTK

SEQ ID NO: 778 - protein, 15 aa, Homo sapiens
VTGGRGGRQGPSPAF

SEQ ID NO: 779 - protein, 15 aa, Homo sapiens
CNFSTIDVVSLKTDT

SEQ ID NO: 780 - protein, 15 aa, Homo sapiens
LTDHRAHRCPGDGDD

SEQ ID NO: 781 - protein, 15 aa, Homo sapiens
SNLTKHKKIHIEKKP

SEQ ID NO: 782 - protein, 15 aa, Homo sapiens
IHKMIHTGEKPYKCE

SEQ ID NO: 783 - protein, 15 aa, Homo sapiens
LQNHIQTIHRELVPD

SEQ ID NO: 784 - protein, 15 aa, Homo sapiens
NVAKPSSGPHTLLHI

SEQ ID NO: 785 - protein, 15 aa, Homo sapiens
SNLTTHKKIHTGERP

SEQ ID NO: 786 - protein, 15 aa, Homo sapiens
EKPYSCPDCSLRFAY

SEQ ID NO: 787 - protein, 15 aa, Homo sapiens
KCEECDTVFSRKSHH

SEQ ID NO: 788 - protein, 15 aa, Homo sapiens
GCGKVFARSENLKIH

SEQ ID NO: 789 - protein, 9 aa, Homo sapiens
RYQQWMERF

SEQ ID NO: 790 - protein, 9 aa, Homo sapiens
SAGPPSLRK

SEQ ID NO: 791 - protein, 15 aa, Homo sapiens
PMEKPTISTEKPTIP

SEQ ID NO: 792 - protein, 10 aa, Homo sapiens
APIWPYEILY

SEQ ID NO: 793 - protein, 9 aa, Homo sapiens
CYTWNQMNL

SEQ ID NO: 794 - protein, 12 aa, Homo sapiens
DAEKSDICTDEY

SEQ ID NO: 795 - protein, 10 aa, Homo sapiens
ELAGIGILTV

SEQ ID NO: 796 - protein, 9 aa, Homo sapiens
IMDQVPFSV

SEQ ID NO: 797 - protein, 9 aa, Homo sapiens
KLCPVQLWV

SEQ ID NO: 798 - protein, 9 aa, Homo sapiens
LMLGEFLKL

SEQ ID NO: 799 - protein, 9 aa, Homo sapiens
SLLMWITQA

SEQ ID NO: 800 - protein, 9 aa, Homo sapiens
SLLMWITQV

SEQ ID NO: 801 - protein, 9 aa, Homo sapiens
SLPPPGTRV

SEQ ID NO: 802 - protein, 8 aa, Homo sapiens
TLGIVCPI

SEQ ID NO: 803 - protein, 9 aa, Homo sapiens
VLPDVFIRC

SEQ ID NO: 804 - protein, 9 aa, Homo sapiens
YLEPGPVTL

SEQ ID NO: 805 - protein, 9 aa, Homo sapiens
YLEPGPVTV

SEQ ID NO: 806 - protein, 10 aa, Homo sapiens
YLEPGPVTVP

SEQ ID NO: 807 - protein, 9 aa, Homo sapiens
YLGSYGFRL

SEQ ID NO: 808 - protein, 15 aa, Homo sapiens
GELIGILNAAKVPAD

SEQ ID NO: 809 - protein, 9 aa, Homo sapiens
ALGIGILTV

SEQ ID NO: 810 - protein, 11 aa, Homo sapiens
KAVAAWTLKAA

SEQ ID NO: 811 - protein, 10 aa, Homo sapiens
FATGIGIITV

SEQ ID NO: 812 - protein, 10 aa, Homo sapiens
FLTGIGIITV

SEQ ID NO: 813 - protein, 10 aa, Homo sapiens
ALAGIGILTV

SEQ ID NO: 814 - protein, 10 aa, Homo sapiens
ELAAIGILTV

SEQ ID NO: 815 - protein, 10 aa, Homo sapiens
ELAGIGILAV

SEQ ID NO: 816 - protein, 10 aa, Homo sapiens
GVAGIGILTG

SEQ ID NO: 817 - protein, 10 aa, Homo sapiens
SAAGIGILTV

SEQ ID NO: 818 - protein, 9 aa, Homo sapiens
SVYDFFVWL

SEQ ID NO: 819 - protein, 9 aa, Homo sapiens
ALEPGPVTA

SEQ ID NO: 820 - protein, 9 aa, Homo sapiens
YLEAGPVTA

SEQ ID NO: 821 - protein, 9 aa, Homo sapiens
YLEPGAVTA

SEQ ID NO: 822 - protein, 9 aa, Homo sapiens
YLEPGPATA

SEQ ID NO: 823 - protein, 9 aa, Homo sapiens
YLEPGPVAA

SEQ ID NO: 824 - protein, 9 aa, Homo sapiens
AMFWSVPTV

SEQ ID NO: 825 - protein, 9 aa, Homo sapiens
CLNEYHLFL

SEQ ID NO: 826 - protein, 10 aa, Homo sapiens
EYYSKNLNSF

SEQ ID NO: 827 - protein, 9 aa, Homo sapiens
FLYNLLTRV

SEQ ID NO: 828 - protein, 9 aa, Homo sapiens
GLGPGFSSY

SEQ ID NO: 829 - protein, 9 aa, Homo sapiens
HLYASLSRV

SEQ ID NO: 830 - protein, 9 aa, Homo sapiens
IILVAVPHV

SEQ ID NO: 831 - protein, 9 aa, Homo sapiens
KLMNIQQKL

SEQ ID NO: 832 - protein, 9 aa, Homo sapiens
KMIGNHLWV

SEQ ID NO: 833 - protein, 9 aa, Homo sapiens
MLGEQLFPL

SEQ ID NO: 834 - protein, 9 aa, Homo sapiens
QLSCISTYV

SEQ ID NO: 835 - protein, 9 aa, Homo sapiens
TYLPSAWNF

SEQ ID NO: 836 - protein, 10 aa, Homo sapiens
TYLPSAWNFF

SEQ ID NO: 837 - protein, 9 aa, Homo sapiens
VYQYTFPDF

SEQ ID NO: 838 - protein, 10 aa, Homo sapiens
VYQYTFPDFL

SEQ ID NO: 839 - protein, 8 aa, Homo sapiens
YQYTFPDF

SEQ ID NO: 840 - protein, 10 aa, Homo sapiens
YQYTFPDFLY

SEQ ID NO: 841 - protein, 9 aa, Homo sapiens
YSKNLNSFF

SEQ ID NO: 842 - protein, 9 aa, Homo sapiens
YYSKNLNSF

SEQ ID NO: 843 - protein, 10 aa, Homo sapiens
YYSKNLNSFF

SEQ ID NO: 844 - protein, 9 aa, Homo sapiens
AVCPWTWLR

SEQ ID NO: 845 - protein, 11 aa, Homo sapiens
APARLERRHSA

SEQ ID NO: 846 - protein, 11 aa, Homo sapiens
GEEDGAGGHSL

SEQ ID NO: 847 - protein, 9 aa, Homo sapiens
GLLDEDFYA

SEQ ID NO: 848 - protein, 9 aa, Homo sapiens
GQFLTPNSH

SEQ ID NO: 849 - protein, 10 aa, Homo sapiens
HQNPVTGLLL

SEQ ID NO: 850 - protein, 11 aa, Homo sapiens
RHDLPPYRVYL

SEQ ID NO: 851 - protein, 25 aa, Homo sapiens
RKTVRARSRTPSCRSRSHTPSRRRR

SEQ ID NO: 852 - protein, 9 aa, Homo sapiens
RVSTLRVSL

SEQ ID NO: 853 - protein, 25 aa, Homo sapiens
SWISDIRAGTAPLCRNHIKSSCSLI

SEQ ID NO: 854 - protein, 9 aa, Homo sapiens
SYMIMEIEL

SEQ ID NO: 855 - protein, 9 aa, Homo sapiens
TLWCSPIKV

SEQ ID NO: 856 - protein, 10 aa, Homo sapiens
VLLGVKLFGV

SEQ ID NO: 857 - protein, 11 aa, Homo sapiens
WLIRETQPITK

SEQ ID NO: 858 - protein, 8 aa, Homo sapiens
YHSIEWAI

SEQ ID NO: 859 - protein, 9 aa, Homo sapiens
EAKPSRILM

SEQ ID NO: 860 - protein, 10 aa, Homo sapiens
GIAARVKNWL

SEQ ID NO: 861 - protein, 11 aa, Homo sapiens
KEGIAARVKNW

SEQ ID NO: 862 - protein, 9 aa, Homo sapiens
WEAKPSRIL

SEQ ID NO: 863 - protein, 13 aa, Homo sapiens
AARGPHGGAASGL

SEQ ID NO: 864 - protein, 13 aa, Homo sapiens
APAGPHGGAASGL

SEQ ID NO: 865 - protein, 13 aa, Homo sapiens
APRGAHGGAASGL

SEQ ID NO: 866 - protein, 13 aa, Homo sapiens
APRGPAGGAASGL

SEQ ID NO: 867 - protein, 13 aa, Homo sapiens
APRGPHAGAASGL

SEQ ID NO: 868 - protein, 13 aa, Homo sapiens
APRGPHGGAAAGL

SEQ ID NO: 869 - protein, 13 aa, Homo sapiens
APRGPHGGAASAL

SEQ ID NO: 870 - protein, 13 aa, Homo sapiens
APRGPHGGAASGA

SEQ ID NO: 871 - protein, 9 aa, Homo sapiens
GRIAFFLKY

SEQ ID NO: 872 - protein, 9 aa, Homo sapiens
KLILWRGLK

SEQ ID NO: 873 - protein, 10 aa, Homo sapiens
ILEDRGFNQV

SEQ ID NO: 874 - protein, 10 aa, Homo sapiens
IMEDVGWLNV

SEQ ID NO: 875 - protein, 10 aa, Homo sapiens
LMFDRGMSLL

SEQ ID NO: 876 - protein, 10 aa, Homo sapiens
MMWDAGLGMM

SEQ ID NO: 877 - protein, 10 aa, Homo sapiens
MMWDRGAGMM

SEQ ID NO: 878 - protein, 10 aa, Homo sapiens
MMWDRGLGAM

SEQ ID NO: 879 - protein, 9 aa, Homo sapiens
MMWDRGLGM

SEQ ID NO: 880 - protein, 10 aa, Homo sapiens
MMWDRGLGMM

SEQ ID NO: 881 - protein, 10 aa, Homo sapiens
MMWDRGMGLL

SEQ ID NO: 882 - protein, 9 aa, Homo sapiens
NLSNLGILV

SEQ ID NO: 883 - protein, 10 aa, Homo sapiens
NMGGLGIMPV

SEQ ID NO: 884 - protein, 10 aa, Homo sapiens
SMAGIGIVDV

SEQ ID NO: 885 - protein, 10 aa, Homo sapiens
SMLGIGIVPV

SEQ ID NO: 886 - protein, 9 aa, Homo sapiens
CMWGRLWQL

SEQ ID NO: 887 - protein, 10 aa, Homo sapiens
NLSNLGILPV

SEQ ID NO: 888 - protein, 10 aa, Homo sapiens
SLANIGILPV

SEQ ID NO: 889 - protein, 10 aa, Homo sapiens
ITSAIGILPV

SEQ ID NO: 890 - protein, 10 aa, Homo sapiens
ITSAIGVLFV

SEQ ID NO: 891 - protein, 10 aa, Homo sapiens
ITSAIGVLPI

SEQ ID NO: 892 - protein, 10 aa, Homo sapiens
ITSAIGVLPV

SEQ ID NO: 893 - protein, 10 aa, Homo sapiens
ITSGIGVLPV

SEQ ID NO: 894 - protein, 10 aa, Homo sapiens
LTSAIGVLPV

SEQ ID NO: 895 - protein, 10 aa, Homo sapiens
MTSAIGILPV

SEQ ID NO: 896 - protein, 10 aa, Homo sapiens
MTSAIGVLPV

SEQ ID NO: 897 - protein, 10 aa, Homo sapiens
QTSAIGILPV

SEQ ID NO: 898 - protein, 10 aa, Homo sapiens
QTSAIGVLPV

SEQ ID NO: 899 - protein, 11 aa, Homo sapiens
FILLLFLTIFI

SEQ ID NO: 900 - protein, 10 aa, Homo sapiens
FISIFFFLEI

SEQ ID NO: 901 - protein, 10 aa, Homo sapiens
FMDMAILVES

SEQ ID NO: 902 - protein, 10 aa, Homo sapiens
ILLLFLTIFI

SEQ ID NO: 903 - protein, 10 aa, Homo sapiens
LLFLTIFIYA

SEQ ID NO: 904 - protein, 9 aa, Homo sapiens
LLLFLTIFI

SEQ ID NO: 905 - protein, 9 aa, Homo sapiens
RLMVAVEEA

SEQ ID NO: 906 - protein, 11 aa, Homo sapiens
RLMVAVEEAFI

SEQ ID NO: 907 - protein, 10 aa, Homo sapiens
DLAGIGILTV

SEQ ID NO: 908 - protein, 10 aa, Homo sapiens
EIAGIGILTV

SEQ ID NO: 909 - protein, 10 aa, Homo sapiens
ELAGIGIITV

SEQ ID NO: 910 - protein, 10 aa, Homo sapiens
ELAGIGILSV

SEQ ID NO: 911 - protein, 10 aa, Homo sapiens
ELAGIGILTA

SEQ ID NO: 912 - protein, 10 aa, Homo sapiens
ELAGIGILTI

SEQ ID NO: 913 - protein, 10 aa, Homo sapiens
ELAGIGLLTV

SEQ ID NO: 914 - protein, 10 aa, Homo sapiens
ELGGIGILTV

SEQ ID NO: 915 - protein, 9 aa, Homo sapiens
AYRDLQTRK

SEQ ID NO: 916 - protein, 25 aa, Homo sapiens
EGTKGATMDLEIVNLPNVEISKDLS

SEQ ID NO: 917 - protein, 25 aa, Homo sapiens
EWDPLDIAFETWDIIFRNMNKEDEG

SEQ ID NO: 918 - protein, 25 aa, Homo sapiens
GKAFGLCSIFTEQKKIFSREKCYKC

SEQ ID NO: 919 - protein, 25 aa, Homo sapiens
HYNYMCNSSCMGSMNRRPILTIITL

SEQ ID NO: 920 - protein, 25 aa, Homo sapiens
ILQYLDSERRQIRIAKSPLAPFTSF

SEQ ID NO: 921 - protein, 25 aa, Homo sapiens
KQHVCGGSILDPYWVLTAAHCFRKH

SEQ ID NO: 922 - protein, 25 aa, Homo sapiens
LGSRELFCSKLRRAAVFPPAHQQRT

SEQ ID NO: 923 - protein, 24 aa, Homo sapiens
MTEYKLVVVGAVGVGKSALTIQLI

SEQ ID NO: 924 - protein, 25 aa, Homo sapiens
NTVFGAERKKRLFIIGPTSRDRSSP

SEQ ID NO: 925 - protein, 25 aa, Homo sapiens
PAIRVPPVIPLGSRELFCSKLRRAA

SEQ ID NO: 926 - protein, 25 aa, Homo sapiens
PGISSQHFTYQGGVGGSWPVCSGLG

SEQ ID NO: 927 - protein, 25 aa, Homo sapiens
PTPSAPCPATPAVPKGRVFVSPLAK

SEQ ID NO: 928 - protein, 25 aa, Homo sapiens
SFVNDIFERIAGVASRLAHYNKRST

SEQ ID NO: 929 - protein, 23 aa, Homo sapiens
SLAALKKALADGGYDVEKNNSRI

SEQ ID NO: 930 - protein, 25 aa, Homo sapiens
VISAEKAYHEQLTVAEITNACFEPA

SEQ ID NO: 931 - protein, 25 aa, Homo sapiens
VRLAQGLTHLGKATLTLCPYHSDRQ

SEQ ID NO: 932 - protein, 9 aa, Homo sapiens
FISNTVFRK

SEQ ID NO: 933 - protein, 9 aa, Homo sapiens
FLFELIPEP

SEQ ID NO: 934 - protein, 9 aa, Homo sapiens
FLGEAWAQV

SEQ ID NO: 935 - protein, 9 aa, Homo sapiens
FVGALSFSI

SEQ ID NO: 936 - protein, 9 aa, Homo sapiens
ILGIFNEFV

SEQ ID NO: 937 - protein, 9 aa, Homo sapiens
ILSPSAHEL

SEQ ID NO: 938 - protein, 9 aa, Homo sapiens
IMSSSLFNL

SEQ ID NO: 939 - protein, 9 aa, Homo sapiens
KIYRRQIFK

SEQ ID NO: 940 - protein, 9 aa, Homo sapiens
KLADYLNVL

SEQ ID NO: 941 - protein, 9 aa, Homo sapiens
KVFEHVGSR

SEQ ID NO: 942 - protein, 9 aa, Homo sapiens
LLHGFSFYL

SEQ ID NO: 943 - protein, 9 aa, Homo sapiens
LLVDLAEEL

SEQ ID NO: 944 - protein, 9 aa, Homo sapiens
LPRAKKLIL

SEQ ID NO: 945 - protein, 9 aa, Homo sapiens
NLRYFAKSL

SEQ ID NO: 946 - protein, 9 aa, Homo sapiens
QMIYSAARV

SEQ ID NO: 947 - protein, 10 aa, Homo sapiens
RLFGEAPREL

SEQ ID NO: 948 - protein, 9 aa, Homo sapiens
RLSDFSEQL

SEQ ID NO: 949 - protein, 9 aa, Homo sapiens
RMWDFDIFL

SEQ ID NO: 950 - protein, 9 aa, Homo sapiens
SLLRSLENV

SEQ ID NO: 951 - protein, 9 aa, Homo sapiens
SLRSHHYSL

SEQ ID NO: 952 - protein, 9 aa, Homo sapiens
VLDGFIPGT

SEQ ID NO: 953 - protein, 9 aa, Homo sapiens
VLQEATICV

SEQ ID NO: 954 - protein, 9 aa, Homo sapiens
WVLALFDEV

SEQ ID NO: 955 - protein, 9 aa, Homo sapiens
YILKYSVFL

SEQ ID NO: 956 - protein, 9 aa, Homo sapiens
DANSFLQSV

SEQ ID NO: 957 - protein, 21 aa, Homo sapiens
TEYKLVVVGAVGVGKSALTIQ

SEQ ID NO: 958 - protein, 15 aa, Homo sapiens
AGAFLSSPGLLAVFG

SEQ ID NO: 959 - protein, 25 aa, Homo sapiens
ARGGLVDEKALARALKEGRIRGAAL

SEQ ID NO: 960 - protein, 9 aa, Homo sapiens
FEDKSVAYT

SEQ ID NO: 961 - protein, 9 aa, Homo sapiens
FYNDIILMV

SEQ ID NO: 962 - protein, 15 aa, Homo sapiens
GFPAERLEGVYSNNI

SEQ ID NO: 963 - protein, 15 aa, Homo sapiens
GLNFVSVKGPELLNM

SEQ ID NO: 964 - protein, 13 aa, Homo sapiens
KALARALKEGRIR

SEQ ID NO: 965 - protein, 15 aa, Homo sapiens
LILFFHTLGLQTKEE

SEQ ID NO: 966 - protein, 15 aa, Homo sapiens
NNTDIRLIGEKLFHG

SEQ ID NO: 967 - protein, 10 aa, Homo sapiens
RYYVGHKAKF

SEQ ID NO: 968 - protein, 10 aa, Homo sapiens
YEGQVISNGF

SEQ ID NO: 969 - protein, 9 aa, Homo sapiens
CLWGRLWQL

SEQ ID NO: 970 - protein, 15 aa, Homo sapiens
ALPLSEPMRRSVSEE

SEQ ID NO: 971 - protein, 15 aa, Homo sapiens
EMSALLARRRRIVEK

SEQ ID NO: 972 - protein, 10 aa, Homo sapiens
FLQEVNVCGV

SEQ ID NO: 973 - protein, 10 aa, Homo sapiens
KLVVVGADGV

SEQ ID NO: 974 - protein, 15 aa, Homo sapiens
LKLMAYLAGAKYTGC

SEQ ID NO: 975 - protein, 10 aa, Homo sapiens
LLKAELVAGL

SEQ ID NO: 976 - protein, 15 aa, Homo sapiens
PKPVLHMVSSEQHSG

SEQ ID NO: 977 - protein, 15 aa, Homo sapiens
QWINYFDKRRDYLKF

SEQ ID NO: 978 - protein, 15 aa, Homo sapiens
RTDLVKSELLHIECQ

SEQ ID NO: 979 - protein, 15 aa, Homo sapiens
SEIVPCLSERHKAYL

SEQ ID NO: 980 - protein, 15 aa, Homo sapiens
SFYNNLVSFASPLVT

SEQ ID NO: 981 - protein, 15 aa, Homo sapiens
VAGCYLKYKNKNSLS

SEQ ID NO: 982 - protein, 15 aa, Homo sapiens
AFMYAKKGEWKKAEE

SEQ ID NO: 983 - protein, 15 aa, Homo sapiens
AFTMLLYCELLQWED

SEQ ID NO: 984 - protein, 15 aa, Homo sapiens
AGQNPASDPPPDDAE

SEQ ID NO: 985 - protein, 15 aa, Homo sapiens
AGRFGQGDHHAAGQA

SEQ ID NO: 986 - protein, 15 aa, Homo sapiens
ALKIKGIRPYHSLSY

SEQ ID NO: 987 - protein, 15 aa, Homo sapiens
ARVILGVCWYVETTS

SEQ ID NO: 988 - protein, 15 aa, Homo sapiens
AVKRLPLIYCDYHGH

SEQ ID NO: 989 - protein, 15 aa, Homo sapiens
AVVFQDSMVFRVAPW

SEQ ID NO: 990 - protein, 15 aa, Homo sapiens
AVYTPPSDSTHQMPR

SEQ ID NO: 991 - protein, 15 aa, Homo sapiens
CNECGKALCQSPSLI

SEQ ID NO: 992 - protein, 15 aa, Homo sapiens
CNFSTIDVSLKTDTE

SEQ ID NO: 993 - protein, 15 aa, Homo sapiens
CRGSGKSKVGTSGDH

SEQ ID NO: 994 - protein, 15 aa, Homo sapiens
CVSMLGVLVDPDTLH

SEQ ID NO: 995 - protein, 15 aa, Homo sapiens
DEMDCPLRPTPPLCS

SEQ ID NO: 996 - protein, 14 aa, Homo sapiens
DFGFALTLAAPGDI

SEQ ID NO: 997 - protein, 15 aa, Homo sapiens
DPSAIGLVDPPIPSP

SEQ ID NO: 998 - protein, 15 aa, Homo sapiens
ECGKAFNSSSNLTKH

SEQ ID NO: 999 - protein, 15 aa, Homo sapiens
ECGQAFSISSNLMRH

SEQ ID NO: 1000 - protein, 15 aa, Homo sapiens
EECGKAFRVFSTLTK

SEQ ID NO: 1001 - protein, 15 aa, Homo sapiens
EECGKPFKRFSYLTV

SEQ ID NO: 1002 - protein, 13 aa, Homo sapiens
EFPVLQAAAIYLK

SEQ ID NO: 1003 - protein, 15 aa, Homo sapiens
EHSQETEILREALLS

SEQ ID NO: 1004 - protein, 15 aa, Homo sapiens
EKKQQFRSLKEKCFL

SEQ ID NO: 1005 - protein, 15 aa, Homo sapiens
EKPYSCPECSLRFAY

SEQ ID NO: 1006 - protein, 15 aa, Homo sapiens
EPGDTALHLCASSQS

SEQ ID NO: 1007 - protein, 15 aa, Homo sapiens
FASPGDDRDGRAEGF

SEQ ID NO: 1008 - protein, 15 aa, Homo sapiens
FEGTEMWYPNRELSE

SEQ ID NO: 1009 - protein, 15 aa, Homo sapiens
FSISQLQTNHDMNDE

SEQ ID NO: 1010 - protein, 13 aa, Homo sapiens
GAIVIELPNVKWS

SEQ ID NO: 1011 - protein, 15 aa, Homo sapiens
GCLGGENCFRLRLES

SEQ ID NO: 1012 - protein, 15 aa, Homo sapiens
GEPIPQPVRLRYVTS

SEQ ID NO: 1013 - protein, 12 aa, Homo sapiens
GLLRYWRTERLF

SEQ ID NO: 1014 - protein, 15 aa, Homo sapiens
GLPTDTICKEFRTRM

SEQ ID NO: 1015 - protein, 15 aa, Homo sapiens
GRKFAAWGPPSFSQT

SEQ ID NO: 1016 - protein, 15 aa, Homo sapiens
GRLILWEGPPLGAGG

SEQ ID NO: 1017 - protein, 15 aa, Homo sapiens
GRNSFEVLVCACPGR

SEQ ID NO: 1018 - protein, 15 aa, Homo sapiens
GYGEMGSVYREDLGA

SEQ ID NO: 1019 - protein, 15 aa, Homo sapiens
HGLSHSLWQISSQLS

SEQ ID NO: 1020 - protein, 15 aa, Homo sapiens
HKRIHNGDKPYKCEE

SEQ ID NO: 1021 - protein, 15 aa, Homo sapiens
HNNIVYNKYISHREH

SEQ ID NO: 1022 - protein, 15 aa, Homo sapiens
HQRTHTGDKPFKCDE

SEQ ID NO: 1023 - protein, 15 aa, Homo sapiens
IHKMIHTVEKPYKCE

SEQ ID NO: 1024 - protein, 15 aa, Homo sapiens
IHSSWDCSLFTNYSA

SEQ ID NO: 1025 - protein, 13 aa, Homo sapiens
ILFSLQPGLLRYW

SEQ ID NO: 1026 - protein, 15 aa, Homo sapiens
ILLIHCDTHLHTPMY

SEQ ID NO: 1027 - protein, 15 aa, Homo sapiens
IMASKGMHHFCLISE

SEQ ID NO: 1028 - protein, 15 aa, Homo sapiens
KAFSQSSSLRKHEII

SEQ ID NO: 1029 - protein, 15 aa, Homo sapiens
KCDECGNDFNWPATL

SEQ ID NO: 1030 - protein, 15 aa, Homo sapiens
KCEECDTDFSRKSHH

SEQ ID NO: 1031 - protein, 15 aa, Homo sapiens
KELRALREMVSNMSG

SEQ ID NO: 1032 - protein, 11 aa, Homo sapiens
KLKKKQVKVFA

SEQ ID NO: 1033 - protein, 15 aa, Homo sapiens
KLSVAPSVVLEEDQV

SEQ ID NO: 1034 - protein, 15 aa, Homo sapiens
KLVVVGAVGVGKSAL

SEQ ID NO: 1035 - protein, 15 aa, Homo sapiens
KPVILGVCWYVETTS

SEQ ID NO: 1036 - protein, 15 aa, Homo sapiens
KSEGEEAHEVEGETQ

SEQ ID NO: 1037 - protein, 15 aa, Homo sapiens
LADGEGGATDEGIYD

SEQ ID NO: 1038 - protein, 14 aa, Homo sapiens
LELINKLLSPVVPQ

SEQ ID NO: 1039 - protein, 15 aa, Homo sapiens
LFGLGKDVGWGPPAR

SEQ ID NO: 1040 - protein, 15 aa, Homo sapiens
LGLWRGEAVTLSNPK

SEQ ID NO: 1041 - protein, 15 aa, Homo sapiens
LLDRGSFWNDGLKAS

SEQ ID NO: 1042 - protein, 15 aa, Homo sapiens
LLIHCDAYLHTPMYF

SEQ ID NO: 1043 - protein, 14 aa, Homo sapiens
LNKVTIDAIHRLPL

SEQ ID NO: 1044 - protein, 15 aa, Homo sapiens
LQNHIQTFHRELVPD

SEQ ID NO: 1045 - protein, 15 aa, Homo sapiens
LRPQLAEKKQQFRNL

SEQ ID NO: 1046 - protein, 15 aa, Homo sapiens
LTDHRAHCCPGGNAK

SEQ ID NO: 1047 - protein, 15 aa, Homo sapiens
LWHLQGPEDLMLKLR

SEQ ID NO: 1048 - protein, 15 aa, Homo sapiens
LWTEGMLKMAFHILA

SEQ ID NO: 1049 - protein, 15 aa, Homo sapiens
MNAAVTFTNCALGRV

SEQ ID NO: 1050 - protein, 14 aa, Homo sapiens
MSYDYHHNWGRDGG

SEQ ID NO: 1051 - protein, 15 aa, Homo sapiens
NLVHGPPGPPQVGAD

SEQ ID NO: 1052 - protein, 12 aa, Homo sapiens
NVSFFHYQEYGY

SEQ ID NO: 1053 - protein, 15 aa, Homo sapiens
PFSPSHPGPPSDPSH

SEQ ID NO: 1054 - protein, 15 aa, Homo sapiens
PMEKPTITTEKPTIP

SEQ ID NO: 1055 - protein, 15 aa, Homo sapiens
PRCCISSFCRPSCCV

SEQ ID NO: 1056 - protein, 15 aa, Homo sapiens
PSRHRYGTRQPRARL

SEQ ID NO: 1057 - protein, 15 aa, Homo sapiens
PTKCEVEQFTATSFG

SEQ ID NO: 1058 - protein, 15 aa, Homo sapiens
PVCSGASSSCCQQSS

SEQ ID NO: 1059 - protein, 15 aa, Homo sapiens
PWRKFPVHVLGQFLG

SEQ ID NO: 1060 - protein, 14 aa, Homo sapiens
QDLMLEDNLLKLEV

SEQ ID NO: 1061 - protein, 15 aa, Homo sapiens
QEVEGETHKTEGDAQ

SEQ ID NO: 1062 - protein, 15 aa, Homo sapiens
QLLEGLGCTLTVVPE

SEQ ID NO: 1063 - protein, 15 aa, Homo sapiens
QLTAHKMNHTGEKPY

SEQ ID NO: 1064 - protein, 15 aa, Homo sapiens
RKFISLHKKALESDF

SEQ ID NO: 1065 - protein, 15 aa, Homo sapiens
SGSGSGPFPSLFLNS

SEQ ID NO: 1066 - protein, 15 aa, Homo sapiens
SHNSSLIFHQRVHTG

SEQ ID NO: 1067 - protein, 15 aa, Homo sapiens
SKMGKWCSHCFAWCR

SEQ ID NO: 1068 - protein, 15 aa, Homo sapiens
SKMGKWCSHCFPCCR

SEQ ID NO: 1069 - protein, 15 aa, Homo sapiens
SNDSSLTHHQRVHTG

SEQ ID NO: 1070 - protein, 15 aa, Homo sapiens
SNLTKHKIIHIEKKP

SEQ ID NO: 1071 - protein, 15 aa, Homo sapiens
SNLTTHKIIHTGERP

SEQ ID NO: 1072 - protein, 15 aa, Homo sapiens
SSGGGSSSGGYGGGS

SEQ ID NO: 1073 - protein, 15 aa, Homo sapiens
SSLPGPPGPPGPRGY

SEQ ID NO: 1074 - protein, 15 aa, Homo sapiens
STAYPAPVRRRCCLP

SEQ ID NO: 1075 - protein, 15 aa, Homo sapiens
STLLTEHLRIHTGEK

SEQ ID NO: 1076 - protein, 15 aa, Homo sapiens
STLNTHKSIHTGEEP

SEQ ID NO: 1077 - protein, 15 aa, Homo sapiens
TCCRTTCFRPSCCVS

SEQ ID NO: 1078 - protein, 15 aa, Homo sapiens
TFNCHHAQPWHNQFV

SEQ ID NO: 1079 - protein, 15 aa, Homo sapiens
TGAMNVAIGTIQTGV

SEQ ID NO: 1080 - protein, 15 aa, Homo sapiens
THRPGGKRGRLAGGS

SEQ ID NO: 1081 - protein, 16 aa, Homo sapiens
TIYSLFYSVADQDAPA

SEQ ID NO: 1082 - protein, 10 aa, Homo sapiens
TMLARLVLDS

SEQ ID NO: 1083 - protein, 15 aa, Homo sapiens
TQLRLPGWPTPVSFG

SEQ ID NO: 1084 - protein, 15 aa, Homo sapiens
TRLFPNELANFYNAV

SEQ ID NO: 1085 - protein, 15 aa, Homo sapiens
TSCARRDYPRASSPN

SEQ ID NO: 1086 - protein, 15 aa, Homo sapiens
VMMHGGPAHPGMPMS

SEQ ID NO: 1087 - protein, 15 aa, Homo sapiens
VNTTTSPANTTTSPV

SEQ ID NO: 1088 - protein, 15 aa, Homo sapiens
VPVAQVTMTSTTDAD

SEQ ID NO: 1089 - protein, 15 aa, Homo sapiens
VQLRGRALGGGALRA

SEQ ID NO: 1090 - protein, 15 aa, Homo sapiens
VRRCLPLWALTLEAA

SEQ ID NO: 1091 - protein, 15 aa, Homo sapiens
VTGGRGGWQGPSPAF

SEQ ID NO: 1092 - protein, 15 aa, Homo sapiens
VTVHPTSKSTATSQG

SEQ ID NO: 1093 - protein, 15 aa, Homo sapiens
YVSMMCNKQAYSLAV

SEQ ID NO: 1094 - protein, 9 aa, Homo sapiens
FYGKTILWF

SEQ ID NO: 1095 - protein, 8 aa, Homo sapiens
CLGQLSNA

SEQ ID NO: 1096 - protein, 15 aa, Homo sapiens
GDRFCLGQLSNAHRT

SEQ ID NO: 1097 - protein, 9 aa, Homo sapiens
VYFFLPDHL

SEQ ID NO: 1098 - protein, 9 aa, Homo sapiens
AVMRWGMPL

SEQ ID NO: 1099 - protein, 9 aa, Homo sapiens
KVDPIGHVY

SEQ ID NO: 1100 - protein, 9 aa, Homo sapiens
VMLEGEQEA

SEQ ID NO: 1101 - protein, 9 aa, Homo sapiens
VQLEEEYEV

SEQ ID NO: 1102 - protein, 11 aa, Homo sapiens
ETMQCSELYHM

SEQ ID NO: 1103 - protein, 9 aa, Homo sapiens
EVIVPLSGW

SEQ ID NO: 1104 - protein, 8 aa, Homo sapiens
EVQQFLRY

SEQ ID NO: 1105 - protein, 9 aa, Homo sapiens
QHQPNPFEV

SEQ ID NO: 1106 - protein, 15 aa, Homo sapiens
EFEFAQFPNWYISTS

SEQ ID NO: 1107 - protein, 15 aa, Homo sapiens
RMQAASFGTFEQWVV

SEQ ID NO: 1108 - protein, 15 aa, Homo sapiens
SGHLLLQKLLRAKNV

SEQ ID NO: 1109 - protein, 9 aa, Homo sapiens
ASMPSSPPL

SEQ ID NO: 1110 - protein, 10 aa, Homo sapiens
DYMIHIIEKW

SEQ ID NO: 1111 - protein, 9 aa, Homo sapiens
FICAIIVVV

SEQ ID NO: 1112 - protein, 10 aa, Homo sapiens
FLGAGLFLYF

SEQ ID NO: 1113 - protein, 9 aa, Homo sapiens
GAQSWLWFV

SEQ ID NO: 1114 - protein, 9 aa, Homo sapiens
GRKLFGTHF

SEQ ID NO: 1115 - protein, 9 aa, Homo sapiens
IPINPRRCL

SEQ ID NO: 1116 - protein, 9 aa, Homo sapiens
KQWLVWLFL

SEQ ID NO: 1117 - protein, 10 aa, Homo sapiens
LDYEWGTVTF

SEQ ID NO: 1118 - protein, 9 aa, Homo sapiens
RVRVMAIYK

SEQ ID NO: 1119 - protein, 9 aa, Homo sapiens
SILEQMHRK

SEQ ID NO: 1120 - protein, 9 aa, Homo sapiens
SMACVGFFL

SEQ ID NO: 1121 - protein, 9 aa, Homo sapiens
TSDYLSQSY

SEQ ID NO: 1122 - protein, 9 aa, Homo sapiens
VADINDHAL

SEQ ID NO: 1123 - protein, 10 aa, Homo sapiens
VYRPLHYPLL

SEQ ID NO: 1124 - DNA, 25 bp, Artificial Sequence
  Synthetic Construct
  misc_feature (2)..(2): n is g or absent
  misc_feature (3)..(3): n is g or absent
  misc_feature (4)..(4): n is g or absent
  misc_feature (5)..(5): n is g or absent
gnnnntccatgacgttcctgacgtt

SEQ ID NO: 1125 - protein, 1210 aa, Homo sapiens [sequence omitted]

SEQ ID NO: 1126 - protein, 724 aa, Homo sapiens
MSAEGYQYRALYDYKKEREEDIDLHLGDILTVNKGSLVALGFSDGQEARPEEIGWLNGYNETTGERGDFPGTYVEYIGRKKISPPTPKPRPPRPLPVAPGSSKTEADVEQQALTLPDLAEQFAPPDIAPPLLIKLVEAIEKKGLECSTLYRTQSSSNLAELRQLLDCDTPSVDLEMIDVHVLADAFKRYLLDLPNPVIPAAVYSEMISLAPEVQSSEEYIQLLKKLIRSPSIPHQYWLTLQYLLKHFFKLSQTSSKNLLNARVLSEIFSPMLFRFSAASSDNTENLIKVIEILISTEWNERQPAPALPPKPPKPTTVANNGMNNNMSLQDAEWYWGDISREEVNEKLRDTADGTFLVRDASTKMHGDYTLTLRKGGNNKLIKIFHRDGKYGFSDPLTFSSVVELINHYRNESLAQYNPKLDVKLLYPVSKYQQDQVVKEDNIEAVGKKLHEYNTQFQEKSREYDRLYEEYTRTSQEIQMKRTAIEAFNETIKIFEEQCQTQERYSKEYIEKFKREGNEKEIQRIMHNYDKLKSRISEIIDSRRRLEEDLKKQAAEYREIDKRMNSIKPDLIQLRKTRDQYLMWLTQKGVRQKKLNEWLGNENTEDQYSLVEDDEDLPHHDEKTWNVGSSNRNKAENLLRGKRDGTFLVRESSKQGCYACSVVVDGEVKHCVINKTATGYGFAEPYNLYSSLKELVLHYQHTSLVQHNDSLNVTLAYPVYAQQRR

SEQ ID NO: 1127 - protein, 750 aa, Homo sapiens
MWNLLHETDSAVATARRPRWLCAGALVLAGGFFLLGFLFGWFIKSSNEATNITPKHNMKAFLDELKAENIKKFLYNFTQIPHLAGTEQNFQLAKQIQSQWKEFGLDSVELAHYDVLLSYPNKTHPNYISIINEDGNEIFNTSLFEPPPPGYENVSDIVPPFSAFSPQGMPEGDLVYVNYARTEDFFKLERDMKINCSGKIVIARYGKVFRGNKVKNAQLAGAKGVILYSDPADYFAPGVKSYPDGWNLPGGGVQRGNILNLNGAGDPLTPGYPANEYAYRRGIAEAVGLPSIPVHPIGYYDAQKLLEKMGGSAPPDSSWRGSLKVPYNVGPGFTGNFSTQKVKMHIHSTNEVTRIYNVIGTLRGAVEPDRYVILGGHRDSWVFGGIDPQSGAAVVHEIVRSFGTLKKEGWRPRRTILFASWDAEEFGLLGSTEWAEENSRLLQERGVAYINADSSIEGNYTLRVDCTPLMYSLVHNLTKELKSPDEGFEGKSLYESWTKKSPSPEFSGMPRISKLGSGNDFEVFFQRLGIASGRARYTKNWETNKFSGYPLYHSVYETYELVEKFYDPMFKYHLTVAQVRGGMVFELANSIVLPFDCRDYAVVLRKYADKIYSISMKHPQEMKTYSVSFDSLFSAVKNFTEIASKFSERLQDFDKSNPIVLRMMNDQLMFLERAFIDPLGLPDRPFYRHVIYAPSSHNKYAGESFPGIYDALFDIESKVDPSKAWGEVKRQIYVAAFTVQAAAETLSEVA

SEQ ID NO: 1128 - protein, 141 aa, Homo sapiens
MGPPSASPHRECIPWQGLLLTASLLNFWNPPTTAKLTIESTPFNVAEGKEVLLLVHNLPQHLFGYSWYKGERVDGNSLIVGYVIGTQQATPGAAYSGRETIYTNASLLIHNVTQNDIGFYTLQVIKSDLVNEEATGQFHVY

SEQ ID NO: 1129 - protein, 349 aa, Homo sapiens
MGLSHVDGVSTKTWAFSIACAFLSVLNVTVFLITANFPGLGFPCVYYHIVDYGQFNMTAFNVLHQITPQLFLDSGQIVAYVAFMQFVFILVTIYYVVCWIKINFRKDGSAVNQATIDIQYMGDGLTCFLFILTLDSFQLFILAMSFRLPAIISFTFAMHFIALTAFVVTLITQYQSFDRSTFMLNKLHPKLRGTVKFKTAVVNLLQMAMGFSTMVLSMTLCLGFGNSFLVRTSHMVFSTIIVFTLLACIYLIVLETVLIRYMKVQFGYHFGAFCGMCGALYPIIKYEAITHHEHETTVYVLVGLMFLSWLTLTLCRIIRFFILRHRPSYKPLPDPSEVKPLSSKLDIDE

SEQ ID NO: 1130 - protein, 215 aa, Homo sapiens [sequence omitted]

SEQ ID NO: 1131 - protein, 1644 aa, Homo sapiens
MVDPVGFAEAWKAQFPDSEPPRMELRSVGDIEQELERCKASIRRLEQEVNQERFRMIYLQTLLAKEKKSYDRQRWGFRRAAQAPDGASEPRASASRPQPAPADGADPPPAEEPEARPDGEGSPGKARPGTARRPGAAASGERDDRGPPASVAALRSNFERIRKGHGQPGADAEKPFYVNVEFHHERGLVKVNDKEVSDRISSLGSQAMQMERKKSQHGAGSSVGDASRPPYRGRSSESSCGVDGDYEDAELNPRFLKDNLIDANGGSRPPWPPLEYQPYQSIYVGGMMEGEGKGPLLRSQSTSEQEKRLTWPRRSYSPRSFEDCGGGYTPDCSSNENLTSSEEDFSSGQSSRVSPSPTTYRMFRDKSRSPSQNSQQSFDSSSPPTPQCHKRHRHCPVVVSEATIVGVRKTGQIWPNDGEGAFHGDADGSFGTPPGYGCAADRAEEQRRHQDGLPYIDDSPSSSPHLSSKGRGSRDALVSGALESTKASELDLEKGLEMRKWVLSGILASEETYLSHLQMLTNSCVKLQTVHSIPLTINKEEALQRPVASDFEPQGLSEAARWNSKENLLAGPSENDPNLFVALYDFVASGDNTLSITKGEKLRVLGYNHNGEWCEAQTKNGQGWVPSNYITPVNSLEKHSWYHGPVSRNAAEYLLSSGINGSFLVRESESSPGQRSISLRYEGRVYHYRINTASDGKLYVSSESRFNTLAELVHHHSTVADGLITTLHYPAPKRNKPTVYGVSPNYDKWEMERTDITMKHKLGGGQYGEVYEGVWKKYSLTVAVKTLKEDTMEVEEFLKEAAVMKEIKHPNLVQLLGVCTREPPFYIITEFMTYGNLLDYLRECNRQEVNAVVLLYMATQISSAMEYLEKKNFIHRDLAARNCLVGENHLVKVADFGLSRLMTGDTYTAHAGAKFPIKWTAPESLAYNKFSIKSDVWAFGVLLWEIATYGMSPYPGIDLSQVYELLEKDYRMERPEGCPEKVYELMRACWQWNPSDRPSFAEIHQAFETMFQESSISDEVEKELGKQGVRGAVSTLLQAPELPTKTRTSRRAAEHRDTTDVPEMPHSKGQGESDPLDHEPAVSPLLPRKERGPPEGGLNEDERLLPKDKKTNLFSALIKKKKKTAPTPPKRSSSFREMDGQPERRGAGEEEGRDISNGALAFTPLDTADPAKSPKPSNGAGVPNGALRESGGSGFRSPHLWKKSSTLTSSRLATGEEEGGGSSSKRFLRSCSASCVPHGAKDTEWRSVTLPRDLQSTGRQFDSSTFGGHKSEKPALPRKRAGENRSDQVTRGTVTPPPRLVKKNEEAADEVFKDIMESSPGSSPPNLTPKPLRRQVTVAPASGLPHKEEAGKGSALGTPAAAEPVTPTSKAGSGAPGGTSKGPAEESRVRRHKHSSESPGRDKGKLSRLKPAPPPPPAASAGKAGGKPSQSPSQEAAGEAVLGAKTKATSLVDAVNSDAAKPSQPGEGLKKPVLPATPKPQSAKPSGTPISPAPVPSTLPSASSALAGDQPSSTAFIPLISTRVSLRKTRQPPERIASGAITKGVVLDSTEALCLAISRNSEQMASHSAVLEAGKNLYTFCVSYVDSIQQMRNKFAFREAINKLENNLRELQICPATAGSGPAATQDFSKLLSSVKEISDIVQR

SEQ ID NO: 1132 - protein, 142 aa, Homo sapiens; identical to SEQ ID NO: 61

SEQ ID NO: 1133 - protein, 261 aa, Homo sapiens
MWVPVVFLTLSVTWIGAAPLILSRIVGGWECEKHSQPWQVLVASRGRAVCGGVLVHPQWVLTAAHCIRNKSVILLGRHSLFHPEDTGQVFQVSHSFPHPLYDMSLLKNRFLRPGDDSSHDLMLLRLSEPAELTDAVKVMDLPTQEPALGTTCYASGWGSIEPEEFLTPKKLQCVDLHVISNDVCAQVHPQKVTKFMLCAGRWTGGKSTCSGDSGGPLVCNGVLQGITSWGSEPCALPERPSLYTKVVHYRKWIKDTIVANP

SEQ ID NO: 1134 - protein, 1072 aa, Homo sapiens
DARPPPAAPSFRQVSCLKELVARVLQRLCERGAKNVLAFGFALLDGARGGPPEAFTTSVRSYLPNTVTDALRGSGAWGLLLRRVGDDVLVHLLARCALFVLVAPSCAYQVCGPPLYQLGAATQARPPPHASGPRRRLGCERAWNHSVREAGVPLGLPAPGARRRGGSASRSLPLPKRPRRGAAPEPERTPVGQGSWAHPGRTRGPSDRGFCVVSPARPAEEATSLEGALSGTRHSHPSVGRQHHAGPPSTSRPPRPWDTPCPPVYAETKHFLYSSGDKEQLRPSFLLSSLRPSLTGARRLVETIFLGSRPWMPGTPRRLPRLPQRYWQMRPLFLELLGNHAQCPYGVLLKTHCPLRAAVTPAAGVCAREKPQGSVAAPEEEDTDPRRLVQLLRQHSSPWQVYGFVRACLRRLVPPGLWGSRHNERRFLRNTKKFISLGKHAKLSLQELTWKMSVRDCAWLRRSPGVGCVPAAEHRLREEILAKFLHWLMSVYVVELLRSFFYVTETTFQKNRLFFYRKSVWSKLQSIGIRQHLKRVQLRELSEAEVRQHREARPALLTSRLRFIPKPDGLRPIVNMDYVVGARTFRREKRAERLTSRVKALFSVLNYERARRPGLLGASVLGLDDIHRAWRTFVLRVRAQDPPPELYFVKVDVTGAYDTIPQDRLTEVIASIIKPQNTYCVRRYAVVQKAAHGHVRKAFKSHVSTLTDLQPYMRQFVAHLQETSPLRDAVVIEQSSSLNEASSGLFDVFLRFMCHHAVRIRGKSYVQCQGIPQGSILSTLLCSLCYGDMENKLFAGIRRDGLLLRLVDDFLLVTPHLTHAKTFLRTLVRGVPEYGCVVNLRKTVVNFPVEDEALGGTAFVQMPAHGLFPWCGLLLDTRTLEVQSDYSSYARTSIRASLTFNRGFKAGRNMRRKLFGVLRLKCHSLFLDLQVNSLQTVCTNIYKILLLQAYRFHACVLQLPFHQQVWKNPTFFLRVISDTASLCYSILKAKNAGMSLGAKGAAGPLPSEAVQWLCHQAFLLKLTRHRVTYVPLLGSLRTAQTQLSRKLPGTTLTALEAAANPALPSDFKTILD

SEQ ID NO: 1135 - protein, 976 aa, Homo sapiens
MELQAARACFALLWGCALAAAAAAQGKEVVLLDFAAAGGELGWLTHPYGKGWDLMQNIMNDMPIYMYSVCNVMSGDQDNWLRTNWVYRGEAERIFIELKFTVRDCNSFPGGASSCKETFNLYYAESDLDYGTNFQKRLFTKIDTIAPDEITVSSDFEARHVKLNVEERSVGPLTRKGFYLAFQDIGACVALLSVRVYYKKCPELLQGLAHFPETIAGSDAPSLATVAGTCVDHAVVPPGGEEPRMHCAVDGEWLVPIGQCLCQAGYEKVEDACQACSPGFFKFEASESPCLECPEHTLPSPEGATSCECEEGFFRAPQDPASMPCTRPPSAPHYLTAVGMGAKVELRWTPPQDSGGREDIVYSVTCEQCWPESGECGPCEASVRYSEPPHGLTRTSVTVSDLEPHMNYTFTVEARNGVSGLVTSRSFRTASVSINQTEPPKVRLEGRSTTSLSVSWSIPPPQQSRVWKYEVTYRKKGDSNSYNVRRTEGFSVTLDDLAPDTTYLVQVQALTQEGQGAGSKVHEFQTLSPEGSGNLAVIGGVAVGVVLLLVLAGVGFFIHRRRKNQRARQSPEDVYFSKSEQLKPLKTYVDPHTYEDPNQAVLKFTTEIHPSCVTRQKVIGAGEFGEVYKGMLKTSSGKKEVPVAIKTLKAGYTEKQRVDFLGEAGIMGQFSHHNIIRLEGVISKYKPMMIITEYMENGALDKFLREKDGEFSVLQLVGMLRGIAAGMKYLANMNYVHRDLAARNILVNSNLVCKVSDFGLSRVLEDDPEATYTTSGGKIPIRWTAPEAISYRKFTSASDVWSFGIVMWEVMTYGERPYWELSNHEVMKAINDGFRLPTPMDCPSAIYQLMMQCWQQERARRPKFADIVSILDKLIRAPDSLKTLADFDPRVSIRLPSTSGSEGVPFRTVSEWLESIKMQQYTEHFMAAGYTAIEKVVQMTNDDIKRIGVRLPGHQKRIAYSLLGLKDQVNTVGIPI

SEQ ID NO: 1136 - protein, 175 aa, Homo sapiens
MLPPMALPSVSWMLLSCLILLCQVQGEETQKELPSPRISCPKGSKAYGSPCYALFLSPKSWMDADLACQKRPSGKLVSVLSGAEGSFVSSLVRSISNSYSYIWIGLHDPTQGSEPDGDGWEWSSTDVMNYFAWEKNPSTILNPGHCGSLSRSTGFLKWKDYNCDAKLPYVCKFKD

SEQ ID NO: 1137 - protein, 609 aa, Homo sapiens
MKWVESIFLIFLLNFTESRTLHRNEYGIASILDSYQCTAEISLADLATIFFAQFVQEATYKEVSKMVKDALTAIEKPTGDEQSSGCLENQLPAFLEELCHEKEILEKYGHSDCCSQSEEGRHNCFLAHKKPTPASIPLFQVPEPVTSCEAYEEDRETFMNKFIYEIARRHPFLYAPTILLWAARYDKIIPSCCKAENAVECFQTKAATVTKELRESSLLNQHACAVMKNFGTRTFQAITVTKLSQKFTKVNFTEIQKLVLDVAHVHEHCCRGDVLDCLQDGEKIMSYICSQQDTLSNKITECCKLTTLERGQCIIHAENDEKPEGLSPNLNRFLGDRDFNQFSSGEKNIFLASFVHEYSRRHPQLAVSVILRVAKGYQELLEKCFQTENPLECQDKGEEELQKYIQESQALAKRSCGLFQKLGEYYLQNAFLVAYTKKAPQLTSSELMAITRKMAATAATCCQLSEDKLLACGEGAADIIIGHLCIRHEMTPVNPGVGQCCTSSYANRRPCFSSLVVDETYVPPAFSDDKFIFHKDLCQAQGVALQTMKQEFLINLVKQKPQITEEQLEAVIADFSGLLEKCCQGQEQEVCFAEEGQKLISKTRAALGV

SEQ ID NO: 1138 - protein, 314 aa, Homo sapiens
MAPPQVLAFGLLLAAATATFAAAQEECVCENYKLAVNCFVNNNRQCQCTSVGAQNTVICSKLAAKCLVMKAEMNGSKLGRRAKPEGALQNNDGLYDPDCDESGLFKAKQCNGTSMCWCVNTAGVRRTDKDTEITCSERVRTYWIIIELKHKAREKPYDSKSLRTALQKEITTRYQLDPKFITSILYENNVITIDLVQNSSQKTQNDVDIADVAYYFEKDVKGESLFHSKKMDLTVNGEQLDLDPGQTLIYYVDEKAPEFSMQGLKAGVIAVIVVVVIAVVAGIVVLVISRKKRMAKYEKAEIKEMGEMHRELNA

SEQ ID NO: 1139 - protein, 426 aa, Homo sapiens
MTASAAAELPHSKLLLSAVSVKLEASAGAHRSHCRSPPHLCARVRMRSDGRNNVVFSSDGCQVRHTHACLDRDHLSSADPGQWSAGHVRQWLDWAVQEYGLPPLDVSLFQGVDGKQLCRMSREELQRLTSSYSADVLLSHLHYLRETPLPHLTSDDVDKALQNSPRLMHARNTGGANFIFPNTPVYPPDASRGASRADVGYDAVRRSGWTPALPAAKVSQSSAAIMSKTEEQRAQLDPYQILGPTSSRLANPGSGQIQLWQFLLELLSDSCNSSCITWEGTNGEFKMTDPDEVARRWGERKSKPNMNYDKLSRALRYYYDKNIMTKVHGKRYAYKFDFHGIAQALQPHPPDSSIYKYPAVAADLPYVSSYHPQKMSFMAPHPQAMSVSSSGFFSGPAPYWNTPAAGIYGGPRHPPAHMPSHLGSYY

SEQ ID NO: 1140 - protein, 10 aa, Homo sapiens
VLPDVFIRCV

SEQ ID NO: 1141 - protein, 479 aa, Homo sapiens
MTTLAGAVPRMMRPGPGQNYPRSGFPLEVSTPLGQGRVNQLGGVFINGRPLPNHIRHKIVEMAHHGIRPCVISRQLRVSHGCVSKILCRYQETGSIRPGAIGGSKPKQVTTPDVEKKIEEYKRENPGMFSWEIRDKLLKDAVCDRNTVPSVSSISRILRSKFGKGEEEEADLERKEAEESEKKAKHSIDGILSERASAPQSDEGSDIDSEPDLPLKRKQRRSRTTFTAEQLEELERAFERTHYPDIYTREELAQRAKLTEARVQVWFSNRRARWRKQAGANQLMAFNHLIPGGFPPTAMPTLPTYQLSETSYQPTSIPQAVSDPSSTVHRPQPLPPSTVHQSTIPSNPDSSSAYCLPSTRHGFSSYTDSFVPPSGPSNPMNPTIGNGLSPQVMGLLTNHGGVPHQPQTDYALSPLTGGLEPTTTVSASCSQRLDHMKSLDSLPTSQSYCPPTYSTTGYSMDPVTGYQYGQYGQSKPWTF

SEQ ID NO: 1142 - protein, 1195 aa, Homo sapiens
MKTGLLVLLVCSAAFFAGRRCAATGMDPPSAGFSNGTSGDGGSKRDSNQTMLSRNKRKTLAVDFAVPSLLRYYLAEFIKRPLNGDCQIFRGCYALRANLKMLCVPLQKTISTFVDPRAAKDPENRSAEGQLPFIYQRPLSKVLNLGLTKASRKSNQVVVEIGEDIVRTGCGGLTVHEEDPVLVLEMDLTTILEWWLGAEGGRLRVRLMPEKKAQVPGMEDRYTTAIRAADPRLSLEISSRGEPLGGRNAAGIPRGPWSFSWVAEDDLSFPNAVPKSDHQCPGKGGTCDPQTEEIPEFTWSIVADGNLQEERSGRAGKKTGSPQGWEEGQFFWVNGSAFGGPWALSPWLWGGQGLCTLDMAVFFHPKQSGQYTIRLLERDKPPQALVSTDTLPRITGWAVVHLTLGTRGGAPFRVSAGYDQRIPQEDAATIEPHFTTNCTMASPPGPNITLEGQYHCHQGPGIPLDKLCDFSTDCPLGDDEGDRCRRFLNGSYCSFEEGECGWQSFAGRSLSWRRVQSAAKPGRQSCPSSGATFTVEGGQSKGQRGSVLLKSPLFPPPLRNSPCTVRFWLCSGGLQRNSLSLWIVENSTGPDEQRRLWHLAGESKPERGWRLVTIPLYGLADWFWLQFSAEDGPGPGSTVSLDNVSFSMDCFLASNGEFPPVASSTSRISSRPTSRTPTPSVRSPTVSFPTTDYSKKWIFHTCGAAGPEGPTPSQCLNSYRNTNVNVTVGTSGSFKGIQMWRVPETGTYRITAYGAAGGRSVTAMSRSHGVYITGDFLLRRGELLHVLVGQQGEDACPNANAVLNKICLEQSGPLVNKSQVKGGGGGGGGATYVFKLDGNVHVPLIIAAGGGGRGYSSQSETQLEQMDYDLSQPGRNGRSNSSGGGGGWNDSAPVSQGGRPLVLGGQGGQACQKFWQTRGGFGGGGGGCMSGGGGGGYRGGNTSLHDNPRADGDDGTSFLGPDGEPFLYPLKAMEGDGEVIISPVQNCSHCESGECHESKDGVTCYCDEELILAPDGVSCINASDVSLLPPQPSLSHLALGLSVGTSALIAALLLAVSGVMIMYRRKHTELQSIQLELQSPDCKLSKLRASTIMTDYNPNYCFAGKTASVSDLKEVPRRNISLTRGLGHGAFGEVYEGLAVGIPGEPSPLQVAVKTLPEVCSEQDELDFLMEALIISKFNHQNIVRCIGVSLQAMP

SEQ ID NO: 1143 - protein, 920 aa, Homo sapiens
MEVQLGLGRVYPRPPSKTYRGAFQNLFQSVREVIQNPGPRHPEAASAAPPGASLLLLQQQQQQQQQQQQQQQQQQQQQQQETSPRQQQQQQGEDGSPQAHRRGPTGYLVLDEEQQPSQPQSALECHPERGCVPEPGAAVAASKGLPQQLPAPPDEDDSAAPSTLSLLGPTFPGLSSCSADLKDILSEASTMQLLQQQQQEAVSEGSSSGRAREASGAPTSSKDNYLGGTSTISDNAKELCKAVSVSMGLGVEALEHLSPGEQLRGDCMYAPLLGVPPAVRPTPCAPLAECKGSLLDDSAGKSTEDTAEYSPFKGGYTKGLEGESLGCSGSAAAGSSGTLELPSTLSLYKSGALDEAAAYQSRDYYNFPLALAGPPPPPPPPHPHARIKLENPLDYGSAWAAAAAQCRYGDLASLHGAGAAGPGSGSPSAAASSSWHTLFTAEEGQLYGPCGGGGGGGGGGGGGGGGGGGGGGGEAGAVAPYGYTRPPQGLAGQESDFTAPDVWYPGGMVSRVPYPSPTCVKSEMGPWMDSYSGPYGDMRLETARDHVLPIDYYFPPQKTCLICGDEASGCHYGALTCGSCKVFFKRAAEGKQKYLCASRNDCTIDKFRRKNCPSCRLRKCYEAGMTLGARKLKKLGNLKLQEEGEASSTTSPTEETTQKLTVSHIEGYECQPIFLNVLEAIEPGVVCAGHDNNQPDSFAALLSSLNELGERQLVHVVKWAKALPGFRNLHVDDQMAVIQYSWMGLMVFAMGWRSFTNVNSRMLYFAPDLVFNEYRMHKSRMYSQCVRMRHLSQEFGWLQITPQEFLCMKALLLFSIIPVDGLKNQKFFDELRMNYIKELDRIIACKRKNPTSCSRRFYQLTKLLDSVQPIARELHQFTFDLLIKSHMVSVDFPEMMAEIISVQVPKILSGKVKPIYFHTQ

SEQ ID NO: 1144 - protein, 113 aa, Homo sapiens
MFIASKYEEMYPPEIGDFAFVTDNTYTKHQIRQMEMKILRALNFGLGRPLPLHFLRRASKIGEVDVEQHTLAKYLMELTMLDYDMVHFPPSQIAAGAFCLALKILDNGEWTPT

SEQ ID NO: 1145 - protein, 464 aa, Homo sapiens
MPSCSTSTMPGMICKNPDLEFDSLQPCFYPDEDDFYFGGPDSTPPGEDIWKKFELLPTPPLSPSRGFAEHSSEPPSWVTEMLLENELWGSPAEEDAFGLGGLGGLTPNPVILQDCMWSGFSAREKLERAVSEKLQHGRGPPTAGSTAQSPGAGAASPAGRGHGGAAGAGRAGAALPAELAHPAAECVDPAVVFPFPVNKREPAPVPAAPASAPAAGPAVASGAGIAAPAGAPGVAPPRPGGRQTSGGDHKALSTSGEDTLSDSDDEDDEEEDEEEEIDVVTVEKRRSSSNTKAVTTFTITVRPKNAALGPGRAQSSELILKRCLPIHQQHNYAAPSPYVESEDAPPQKKIKSEASPRPLKSVIPPKAKSLSPRNSDSEDSERRRNHNILERQRRNDLRSSFLTLRDHVPELVKNEKAAKVVILKKATEYVHSLQAEEHQLLLEKEKLQARQQQLLKKIEHARTC

SEQ ID NO: 1146 - protein, 193 aa, Homo sapiens
MAAIRKKLVIVGDGACGKTCLLIVFSKDQFPEVYVPTVFENYIADIEVDGKQVELALWDTAGQEDYDRLRPLSYPDTDVILMCFSIDSPDSLENIPEKWTPEVKHFCPNVPIILVGNKKDLRQDEHTRRELAKMKQEPVRSEEGRDMANRISAFGYLECSAKTKEGVREVFEMATRAGLQVRKNKRRRGCPIL

SEQ ID NO: 1147 - protein, 237 aa, Homo sapiens [sequence omitted]

SEQ ID NO: 1148 - protein, 332 aa, Homo sapiens
MALPTARPLLGSCGTPALGSLLFLLFSLGWVQPSRTLAGETGQEAAPLDGVLANPPNISSLSPRQLLGFPCAEVSGLSTERVRELAVALAQKNVKLSTEQLRCLAHRLSEPPEDLDALPLDLLLFLNPDAFSGPQACTRFFSRITKANVDLLPRGAPERQRLLPAALACWGVRGSLLSEADVRALGGLACDLPGRFVAESAEVLLPRLGIVAAWRQRSSRDPSWRQPERTILRPRFRREVEKTACPSGKKAREIDESLIFYKKWELEACVDAALLATQMDRVNAIPFTYEQLDVLKHKLDELYPQGYPESVIQHLGYLFLKMSPEDIRKWNV

SEQ ID NO: 1149 - protein, 54 aa, Homo sapiens
MAGLALQPGTALLCYSCKAQVSNEDCLQVENCTQLGEQCWTARIREWGDDSRQA

SEQ ID NO: 1150 - protein, 543 aa, Homo sapiens
MGTSLSPNDPWPLNPLSIQQTTLLLLLSVLATVHVGQRLLRQRRRQLRSAPPGPFAWPLIGNAAAVGQAAHLSFARLARRYGDVFQIRLGSCPIVVLNGERAIHQALVQQGSAFADRPAFASFRVVSGGRSMAFGHYSEHWKVQRRAAHSMMRNFFTRQPRSRQVLEGHVLSEARELVALLVRGSADGAFLDPRPLTVVAVANVMSAVCFGCRYSHDDPEFRELLSHNEEFGRTVGAGSLVDVMPWLQYFPNPVRTVFREFEQLNRNFSNFILDKFLRHCESLRPGAAPRDMMDAFILSAEKKAAGDSHGGGARLDLENVPATITDIFGASQDTLSTALQWLLLLFTRYPDVQTRVQAELDQVVGRDRLPCMGDQPNLPYVLAFLYEAMRFSSFVPVTIPHATTANTSVLGYHIPKDTVVFVNQWSVNHDPLKWPNPENFDPARFLDKDGLINKDLTSRVMIFSVGKRRCIGEELSKMQLFLFISILAHQCDFRANPNEPAKMNFSYGLTIKPKSFKVNVTLRESMELLDSAVQNLQAKETCQ

SEQ ID NO: 1151 - protein, 212 aa, Homo sapiens
MKVFKFIGLMILLTSAFSAGSGQSPMTVLCSIDWFMVTVHPFMLNNDVCVHFHELHLGLGCPPNHVQPHAYQFTYRVTECGIRAKAVSQDMVIYSTEIHYSSKGTPSKFVIPVSCAAPQKSPWLTKPCSMRVASKSRATAQKDEKCYEVFSLSQSSQRPNCDCPPCVFSEEEHTQVPCHQAGAQEAQPLQPSHFLDISEDWSLHTDDMIGSM

SEQ ID NO: 1152 - protein, 663 aa, Homo sapiens
MAATEISVLSEQFTKIKELELMPEKGLKEEEKDGVCREKDHRSPSELEAERTSGAFQDSVLEEEVELVLAPSEESEKYILTLQTVHFTSEAVELQDMSLLSIQQQEGVQVVVQQPGPGLLWLEEGPRQSLQQCVAISIQQELYSPQEMEVLQFHALEENVMVASEDSKLAVSLAETTGLIKLEEEQEKNQLLAERTKEQLFFVETMSGDERSDEIVLTVSNSNVEEQEDQPTAGQADAEKAKSTKNQRKTKGAKGTFHCDVCMFTSSRMSSFNRHMKTHTSEKPHLCHLCLKTFRTVTLLRNHVNTHTGTRPYKCNDCNMAFVTSGELVRHRRYKHTHEKPFKCSMCKYASVEASKLKRHVRSHTGERPFQCCQCSYASRDTYKLKRHMRTHSGEKPYECHICHTRFTQSGTMKIHILQKHGENVPKYQCPHCATIIARKSDLRVHMRNLHAYSAAELKCRYCSAVFHERYALIQHQKTHKNEKRFKCKHCSYACKQERHMTAHIRTHTGEKPFTCLSCNKCFRQKQLLNAHFRKYHDANFIPTVYKCSKCGKGFSRWINLHRHSEKCGSGEAKSAASGKGRRTRKRKQTILKEATKGQKEAAKGWKEAANGDEAAAEEASTTKGEQFPGEMFPVACRETTARVKEEVDEGVTCEMLLNTMDK

SEQ ID NO: 1153 - protein, 2201 aa, Homo sapiens
MGAMTQLLAGVFLAFLALATEGGVLKKVIRHKRQSGVNATLPEENQPVVFNHVYNIKLPVGSQCSVDLESASGEKDLAPPSEPSESFQEHTVDGENQIVFTHRINIPRRACGCAAAPDVKELLSRLEELENLVSSLREQCTAGAGCCLQPATGRLDTRPFCSGRGNFSTEGCGCVCEPGWKGPNCSEPECPGNCHLRGRCIDGQCICDDGFTGEDCSQLACPSDCNDQGKCVNGVCICFEGYAGADCSREICPVPCSEEHGTCVDGLCVCHDGFAGDDCNKPLCLNNCYNRGRCVENECVCDEGFTGEDCSELICPNDCFDRGRCINGTCYCEEGFTGEDCGKPTCPHACHTQGRCEEGQCVCDEGFAGVDCSEKRCPADCHNRGRCVDGRCECDDGFTGADCGELKCPNGCSGHGRCVNGQCVCDEGYTGEDCSQLRCPNDCHSRGRCVEGKCVCEQGFKGYDCSDMSCPNDCHQHGRCVNGMCVCDDGYTGEDCRDRQCPRDCSNRGLCVDGQCVCEDGFTGPDCAELSCPNDCHGQGRCVNGQCVCHEGFMGKDCKEQRCPSDCHGQGRCVDGQCICHEGFTGLDCGQHSCPSDCNNLGQCVSGRCICNEGYSGEDCSEVSPPKDLVVTEVTEETVNLAWDNEMRVTEYLVVYTPTHEGGLEMQFRVPGDQTSTIIQELEPGVEYFIRVFAILENKKSIPVSARVATYLPAPEGLKFKSIKETSVEVEWDPLDIAFETWEIIFRNMNKEDEGEITKSLRRPETSYRQTGLAPGQEYEISLHIVKNNTRGPGLKRVTTTRLDAPSQIEVKDVTDTTALITWFKPLAEIDGIELTYGIKDVPGDRTTIDLTEDENQYSIGNLKPDTEYEVSLISRRGDMSSNPAKETFTTGLDAPRNLRRVSQTDNSITLEWRNGKAAIDSYRIKYAPISGGDHAEVDVPKSQQATTKTTLTGLRPGTEYGIGVSAVKEDKESNPATINAATELDTPKDLQVSETAETSLTLLWKTPLAKFDRYRLNYSLPTGQWVGVQLPRNTTSYVLRGLEPGQEYNVLLTAEKGRHKSKPARVKASTEQAPELENLTVTEVGWDGLRLNWTAADQAYEHFIIQVQEANKVEAARNLTVPGSLRAVDIPGLKAATPYTVSIYGVIQGYRTPVLSAEASTGETPNLGEVVVAEVGWDALKLNWTAPEGAYEYFFIQVQEADTVEAAQNLTVPGGLRSTDLPGLKAATHYTITIRGVTQDFSTTPLSVEVLTEEVPDMGNLTVTEVSWDALRLNWTTPDGTYDQFTIQVQEADQVEEAHNLTVPGSLRSMEIPGLRAGTPYTVTLHGEVRGHSTRPLAVEVVTEDLPQLGDLAVSEVGWDGLRLNWTAADNAYEHFVIQVQEVNKVEAAQNLTLPGSLRAVDIPGLEAATPYRVSIYGVIRGYRTPVLSAEASTAKEPEIGNLNVSDITPESFNLSWMATDGIFETFTIEIIDSNRLLETVEYNISGAERTAHISGLPPSTDFIVYLSGLAPSIRTKTISATATTEALPLLENLTISDINPYGFTVSWMASENAFDSFLVTVVDSGKLLDPQEFTLSGTQRKLELRGLITGIGYEVMVSGFTQGHQTKPLRAEIVTEAEPEVDNLLVSDATPDGFRLSWTADEGVFDNFVLKIRDTKKQSEPLEITLLAPERTRDITGLREATEYEIELYGISKGRRSQTVSAIATTAMGSPKEVIFSDITENSATVSWRAPTAQVESFRITYVPITGGTPSMVTVDGTKTQTRLVKLIPGVEYLVSIIAMKGFEESEPVSGSFTTALDGPSGLVTANITDSEALARWQPAIATVDSYVISYTGEKVPEITRTVSGNTVEYALTDLEPATEYTLRIFAEKGPQKSSTITAKFTTDLDSPRDLTATEVQSETALLTWRPPRASVTGYLLVYESVDGTVKEVIVGPDTTSYSLADLSPSTHYTAKIQALNGPLRSNMIQTIFTTIGLLYPFPKDCSQAMLNGDTTSGLYTIYLNGDKAEALEVFCDMTSDGGGWIVFLRRKNGRENFYQNWKAYAAGFGDRREEFWLGLDNLNKITAQGQYELRVDLRDHGETAFAVYDKFSVGDAKTRYKLKVEGYSGTAGDSMAYHNGRSFSTFDKDTDSAITNCALSYKGAFWYRNCHRVNLMGRYGDNNHSQGVNWFHWKGHEHSIQFAEMKLRPSNFRNLEGRRKRA

SEQ ID NO: 1154 - protein, 452 aa, Homo sapiens
MSETPAQCSIKQERISYTPPESPVPSYASSTPLHVPVPRALRMEEDSIRLPAHLRLQPIYWSRDDVAQWLKWAENEFSLRPIDSNTFEMNGKALLLLTKEDFRYRSPHSGDVLYELLQHILKQRKPRILFSPFFHPGNSIHTQPEVILHQNHEEDNCVQRTPRPSVDNVHHNPPTIELLHRSRSPITTNHRPSPDPEQRPLRSPLDNMIRRLSPAERAQGPRPHQENNHQESYPLSVSPMENNHCPASSESHPKPSSPRQESTRVIQLMPSPIMHPLILNPRHSVDFKQSRLSEDGLHREGKPINLSHREDLAYMNHIMVSVSPPEEHAMPIGRIADCRLLWDYVYQLLSDSRYENFIRWEDKESKIFRIVDPNGLARLWGNHKNRTNMTYEKMSRALRHYYKLNIIRKEPGQRLLFRFMKTPDEIMSGRTDRLEHLESQELDEQIYQEDEC

SEQ ID NO: 1155 - protein, 181 aa, Homo sapiens
MCKGLAALPHSCLERAKEIKIKLGILLQKPDSVGDLVIPYNEKPEKPAKTQKTSLDEALQWRDSLDKLLQNNYGLASFKSFLKSEFSEENLEFWIACEDYKKIKSPAKMAEKAKQIYEEFIQTEAPKEVNIDHFTKDITMKNLVEPSLSSFDMAQKRIHALMEKDSLPRFVRSEFYQELIK

SEQ ID NO: 1156 - protein, 963 aa, Homo sapiens
MATAAETSASEPEAESKAGPKADGEEDEVKAARTRRKVLSRAVAAATYKTMGPAWDQQEEGVSESDGDEYAMASSAESSPGEYEWEYDEEEEKNQLEIERLEEQLSINVYDYNCHVDLIRLLRLEGELTKVRMARQKMSEIFPLTEELWLEWLHDEISMAQDGLDREHVYDLFEKAVKDYICPNIWLEYGQYSVGGIGQKGGLEKVRSVFERALSSVGLHMTKGLALWEAYREFESAIVEAARLEKVHSLFRRQLAIPLYDMEATFAEYEEWSEDPIPESVIQNYNKALQQLEKYKPYEEALLQAEAPRLAEYQAYIDFEMKIGDPARIQLIFERALVENCLVPDLWIRYSQYLDRQLKVKDLVLSVHNRAIRNCPWTVALWSRYLLAMERHGVDHQVISVTFEKALNAGFIQATDYVEIWQAYLDYLRRRVDFKQDSSKELEELRAAFTRALEYLKQEVEERFNESGDPSCVIMQNWARIEARLCNNMQKARELWDSIMTRGNAKYANMWLEYYNLERAHGDTQHCRKALHRAVQCTSDYPEHVCEVLLTMERTEGSLEDWDIAVQKTETRLARVNEQRMKAAEKEAALVQQEEEKAEQRKRARAEKKALKKKKKIRGPEKRGADEDDEKEWGDDEEEQPSKRRRVENSIPAAGETQNVEVAAGPAGKCAAVDVEPPSKQKEKAASLKRDMPKVLHDSSKDSITVFVSNLPYSMQEPDTKLRPLFEACGEVVQIRPIFSNRGDFRGYCYVEFKEEKSALQALEMDRKSVEGRPMFVSPCVDKSKNPDFKVFRYSTSLEKHKLFISGLPFSCTKEELEEICKAHGTVKDLRLVTNRAGKPKGLAYVEYENESQASQAVMKMDGMTIKENIIKVAISNPPQRKVPEKPETRKAPGGPMLLPQTYGARGKGRTQLSLLPRALQRPSAAAPQAENGPAAAPAVAAPAATEAPKMSNADFAKLFLRK

SEQ ID NO: 1157 - protein, 249 aa, Homo sapiens
MLILLSRYHWQPDSKDRAFTLNTFHLNRAAMLFDDILHHSQPQACPVSFGRKIRRKNRLQLIRGDPFPAIGNSDDNAVGPTFFCLYANRSLAANRMNSVQVQIQQHLSQPVRVSLNTLKRLIRRESQLNLSALGILTDQIQGVSNNIIEVNRLERQMRGLYQFEQFAYHPVQTVGLFGHHLRQFMRLAAGRRALGKVFRQPFDGRERVTNFVRDARRQMPHRHQLFFTLHCIKQFSVRALITLMPKKRQ

SEQ ID NO: 1158 - protein, 391 aa, Homo sapiens
MDLEKNYPTPRTSRTGHGGVNQLGGVFVNGRPLPDVVRQRIVELAHQGVRPCDISRQLRVSHGCVSKILGRYYETGSIKPGVIGGSKPKVATPKVVEKIAEYKRQNPTMFAWEIRDRLLAERVCDNDTVPSVSSINRIIRTKVQQPPNQPVPASSHSIVSTGSVTQVSSVSTDSAGSSYSISGILGITSPSADTNKRKRDEGIQESPVPNGHSLPGRDFLRKQMRGDLFTQQQLEVLDRVFERQHYSDIFTTTEPIKPEQTTEYSAMASLAGGLDDMKANLASPTPADIGSSVPGPQSYPIVTGRDLASTTLPGYPPHVPPAGQGSYSAPTLTGMVPGSEFSGSPYSHPQYSSYNDSWRFPNPGLLGSPYYYSAAARGAAPPAAATAYDRH

SEQ ID NO: 1159 - protein, 180 aa, Homo sapiens; identical to SEQ ID NO: 9

SEQ ID NO: 1160 - protein, 509 aa, Homo sapiens
MGCGCSSHPEDDWMENIDVCENCHYPIVPLDGKGTLLIRNGSEVRDPLVTYEGSNPPASPLQDNLVIALHSYEPSHDGDLGFEKGEQLRILEQSGEWWKAQSLTTGQEGFIPFNFVAKANSLEPEPWFFKNLSRKDAERQLLAPGNTHGSFLIRESESTAGSFSLSVRDFDQNQGEVVKHYKIRNLDNGGFYISPRITFPGLHELVRHYTNASDGLCTRLSRPCQTQKPQKPWWEDEWEVPRETLKLVERLGAGQFGEVWMGYYNGHTKVAVKSLKQGSMSPDAFLAEANLMKQLQHQRLVRLYAVVTQEPIYIITEYMENGSLVDFLKTPSGIKLTINKLLDMAAQIAEGMAFIEERNYIHRDLRAANILVSDTLSCKIADFGLARLIEDNEYTAREGAKFPIKWTAPEAINYGTFTIKSDVWSFGILLTEIVTHGRIPYPGMTNPEVIQNLERGYRMVRPDNCPEELYQLMRLCWKERPEDRPTFDYLRSVLEDFFTATEGQYQPQP

SEQ ID NO: 1161 - protein, 854 aa, Homo sapiens
MMAYSDTTMMSDDIDWLRSHRGVCKVDLYNPEGQQDQDRKVICFVDVSTLNVEDKDYKDAASSSSEGNLNLGSLEEKEIIVIKDTEKKDQSKTEGSVCLFKQAPSDPVSVLNWLLSDLQKYALGFQHALSPSTSTCKHKVGDTEGEYHRASSENCYSVYADQVNIDYLMNRPQNLRLEMTAAKNTNNNQSPSAPPAKPPSTQRAVISPDGECSIDDLSFYVNRLSSLVIQMAHKEIKEKLEGKSKCLHHSICPSPGNKERISPRTPASKIASEMAYEAVELTAAEMRGTGEESREGGQKSFLYSELSNKSKSGDKQMSQRESKEFADSISKGLMVYANQVASDMMVSLMKTLKVHSSGKPIPASVVLKRVLLRHTKEIVSDLIDSCMKNLHNITGVLMTDSDFVSAVKRNLFNQWKQNATDIMEAMLKRLVSALIGEEKETKSQSLSYASLKAGSHDPKCRNQSLEFSTMKAEMKERDKGKMKSDPCKSLTSAEKVGEHILKEGLTIWNQKQGNSCKVATKACSNKDEKGEKINASTDSLAKDLIVSALKLIQYHLTQQTKGKDTCEEDCPGSTMGYMAQSTQYEKCGGGQSAKALSVKQLESHRAPGPSTCQKENQHLDSQKMDMSNIVLMLIQKLLNENPFKCEDPCEGENKCSEPRASKAASMSNRSDKAEEQCQEHQELDCTSGMKQANGQFIDKLVESVMKLCLIMAKYSNDGAALAELEEQAASANKPNFRGTRCIHSGAMPQNYQDSLGHEVIVNNQCSTNSLQKQLQAVLQWIAASQFNVPMLYFMGDKDGQLEKLPQVSAKAAEKGYSVGGLLQEVMKFAKERQPDEAVGKVARKQLLDWLLANL

SEQ ID NO: 1162 - protein, 81 aa, Homo sapiens
MESPKKKNQQLKVGILHLGSRQKKIRIQLRSQCATWKVICKSCISQTPGINLDLGSGVKVKIIPKEEHCKMPEAGEEQPQV

SEQ ID NO: 1163 - protein, 316 aa, Homo sapiens
MLRGWGGPSVGVCVRTALGVLCLCLTGAVEVQVSEDPVVALVDTDATLRCSFSPEPGFSLAQLNLIWQLTDTKQLVHSFTEGRDQGSAYSNRTALFPDLLVQGNASLRLQRVRVTDEGSYTCFVSIQDFDSAAVSLQVAAPYSKPSMTLEPNKDLRPGNMVTITCSSYQGYPEAEVFWKDGQGVPLTGNVTTSQMANERGLFDVHSVLRVVLGANGTYSCLVRNPVLQQDAHGSVTITGQPLTFPPEALWVTVGLSVCLVVLLVALAFVCWRKIKQSCEEENAGAEDQDGDGEGSKTALRPLKPSENKEDDGQEIA

SEQ ID NO: 1164 - protein, 78 aa, Homo sapiens
MVWKVAVFLSVALGIGAVPIDDPEDGGKHWVVIVAGSNGWYNYRHQADACHAYQIIHRNGIPDEQIVVMMYDDIAYSE

SEQ ID NO: 1165 - protein, 1116 aa, Homo sapiens
MCLLDSCTALLLLGCWMSGSAVRISDVTLVNPDPVVSPLTAPSLLCVSSDWSSGGSVLALGQEFPRPQGSVLALGQEFPHTEPRPHPAAATVTWSSRSHAFGAFYCQIRNSTGRKIYTYKMLQEAAFLPESLTITVNQGENINISYSRRLYSPEDTVIHKNGHFEHSSPKEDISDIIHYPVTNAKAESHAGIYAIRYISAAPSSAAITRLIVRSCRAGFWGPNCTESCPRCANGGVCDDTTGECVCPPGFRGHTCDIVCGEGRFGAGCKERCVDGVCRALVFCLRDPYGCSCASGWRGLSCNDACPDGYYGAGCTQKCVCAKGRCDRFRGCVCAGRHGSRCEEADSSPVISHLRDVEINTGVELSVNCSASGRPAPLHGDITLITANRTTIAAVDTHTLNDQSTSVFRVQQVRVSSAGRWRCQVNNTHMQVEDEFTVEVKVPPRPQNPPVLQGSGPRHLLLLLNTEPYSGDGPIATTTLLYRPASAHTWSSVTAHGPLVRLDNLYPMTQYLTQVQLSRPGPGGAGQAGPAATFSTQVLELPVGVKLSAVSQTALLLSWDIAPAEQHCTYEVSCLQAGAPGTLRTFQLPSNSSAMHLSDLKPRHKYQCTVRSSCGVGQNHPSASAWTLSDQLPPPPANISIWNISDTSAVLTWAVAEGESVSRAVIRFQQVEQAQYRQQVELPVQTQQLHMRFQLLGLRPNTGYQLQLWTVNNMGESAESPPVSLMTLPQQESSALFAAHGHLLLYAILGSAGMTCCTVLLAFCIVLQLKRNTLQRRIHSILREEPAVHFSSAPPPHRRSAVVSRSLVFPALQWSDIQFQDVLGEGNFGQVLKARIRKDGLRMDAAVKRMKDYASQDDHRDFAGELEVLCRLGPHKNIIHLLGACEHRGYLYLAIEFAPHGNLLDFLRKSRVLETDPAFAIAHRTASTLSSQQLLAFSADVARGMSYLSQKQFIHRDLAARNVLVGENFVAKIADFGLSRGQEVYVKKTMGRLPVRWMAIESLNYSVYTTNSDVWSYGVLLWEVVSLGGTPYCGMTCAELYEKLPLGFRLEKPLNCDDEVYELMQQCWREKPFERPSFSQILLSLGRMLEERKTYVNTTLYEKFTYAGIDCSAEEAG

SEQ ID NO: 1166 - protein, 102 aa, Homo sapiens
MSARVRSRSRGRGDGQEAPDVVAFVAPGESQQEEPPTDNQDIEPGQEREGTPPIEERKVEGDCQEMDLEKTRSERGDGSDVKEKTPPNPKHAKTKEAGDGQP

SEQ ID NO: 1167 - protein, 1356 aa, Homo sapiens
MQSKVLLAVALWLCVETRAASVGLPSVSLDLPRLSIQKDILTIKANTTLQITCRGQRDLDWLWPNNQSGSEQRVEVTECSDGLFCKTLTIPKVIGNDTGAYKCFYRETDLASVIYVYVQDYRSPFIASVSDQHGVVYITENKNKTVVIPCLGSISNLNVSLCARYPEKRFVPDGNRISWDSKKGFTIPSYMISYAGMVFCEAKINDESYQSIMYIVVVVGYRIYDVVLSPSHGIELSVGEKLVLNCTARTELNVGIDFNWEYPSSKHQHKKLVNRDLKTQSGSEMKKFLSTLTIDGVTRSDQGLYTCAASSGLMTKKNSTFVRVHEKPFVAFGSGMESLVEATVGERVRIPAKYLGYPPPEIKWYKNGIPLESNHTIKAGHVLTIMEVSERDTGNYTVILTNPISKEKQSHVVSLVVYVPPQIGEKSLISPVDSYQYGTTQTLTCTVYAIPPPHHIHWYWQLEEECANEPSQAVSVTNPYPCEEWRSVEDFQGGNKIEVNKNQFALIEGKNKTVSTLVIQAANVSALYKCEAVNKVGRGERVISFHVTRGPEITLQPDMQPTEQESVSLWCTADRSTFENLTWYKLGPQPLPIHVGELPTPVCKNLDTLWKLNATMFSNSTNDILIMELKNASLQDQGDYVCLAQDRKTKKRHCVVRQLTVLERVAPTITGNLENQTTSIGESIEVSCTASGNPPPQIMWFKDNETLVEDSGIVLKDGNRNLTIRRVRKEDEGLYTCQACSVLGCAKVEAFFIIEGAQEKTNLEIIILVGTAVIAMFFWLLLVIILRTVKRANGGELKTGYLSIVMDPDELPLDEHCERLPYDASKWEFPRDRLKLGKPLGRGAFGQVIEADAFGIDKTATCRTVAVKMLKEGATHSEHRALMSELKILIHIGHHLNVVNLLGACTKPGGPLMVIVEFCKFGNLSTYLRSKRNEFVPYKTKGARFRQGKDYVGAIPVDLKRRLDSITSSQSSASSGFVEEKSLSDVEEEEAPEDLYKDFLTLEHLICYSFQVAKGMEFLASRKCIHRDLAARNILLSEKNVVKICDFGLARDIYKDPDYVRKGDARLPLKWMAPETIFDRVYTIQSDVWSFGVLLWEIFSLGASPYPGVKIDEEFCRRLKEGTRMRAPDYTTPEMYQTMLDCWHGEPSQRPTFSELVEHLGNLLQANAQQDGKDYIVLPISETLSMEEDSGLSLPTSPVSCMEEEEVCDPKFHYDNTAGISQYLQNSKRKSRPVSVKTFEDIPLEEPEVKVIPDDNQTDSGMVLASEELKTLEDRTKLSPSFGGMVPSKSRESVASEGSNQTSGYQSGYHSDDTDTTVYSSEEAELLKLIEIGVQTGSTAQILQPDSGTTLSSPPV

SEQ ID NO: 1168 - protein, 1106 aa, Homo sapiens
MRLPGAMPALALKGELLLLSLLLLLEPQISQGLVVTPPGPELVLNVSSTFVLTCSGSAPVVWERMSQEPPQEMAKAQDGTFSSVLTLTNLTGLDTGEYFCTHNDSRGLETDERKRLYIFVPDPTVGFLPNDAEELFIFLTEITEITIPCRVTDPQLVVTLHEKKGDVALPVPYDHQRGFSGIFEDRSYICKTTIGDREVDSDAYYVYRLQVSSINVSVNAVQTVVRQGENITLMCIVIGNEVVNFEWTYPRKESGRLVEPVTDFLLDMPYHIRSILHIPSAELEDSGTYTCNVTESVNDHQDEKAINITVVESGYVRLLGEVGTLQFAELHRSRTLQVVFEAYPPPTVLWFKDNRTLGDSSAGEIALSTRNVSETRYVSELTLVRVKVAEAGHYTMRAFHEDAEVQLSFQLQINVPVRVLELSESHPDSGEQTVRCRGRGMPQPNIIWSACRDLKRCPRELPPTLLGNSSEEESQLETNVTYWEEEQEFEVVSTLRLQHVDRPLSVRCTLRNAVGQDTQEVIVVPHSLPFKVVVISAILALVVLTIISLIILIMLWQKKPRYEIRWKVIESVSSDGHEYIYVDPMQLPYDSTWELPRDQLVLGRTLGSGAFGQVVEATAHGLSHSQATMKVAVKMLKSTARSSEKQALMSELKIMSHLGPHLNVVNLLGACTKGGPIYIITEYCRYGDLVDYLHRNKHTFLQHHSDKRRPPSAELYSNALPVGLPLPSHVSLTGESDGGYMDMSKDESVDYVPMLDMKGDVKYADIESSNYMAPYDNYVPSAPERTCRATLINESPVLSYMDLVGFSYQVANGMEFLASKNCVHRDLAARNVLICEGKLVKICDFGLARDIMRDSNYISKGSTFLPLKWMAPESIFNSLYTTLSDVWSFGILLWEIFTLGGTPYPELPMNEQFYNAIKRGYRMAQPAHASDEIYEIMQKCWEEKFEIRPPFSQLVLLLERLLGEGYKKKYQQVDEEFLRSDHPAILRSQARLPGFHGLRSPLDTSSVLYTAVQPNEGDNDYIIPLPDPKPEVADEGPLEGSPSLASSTLNEVNTSSTISCDSPLEPQDEPEPEPQLELQVEPEPELEQLPDSGCPAPRAEAEDSFL

SEQ ID NO: 1169 - protein, 158 aa, Human papillomavirus type 16; identical to SEQ ID NO: 92

SEQ ID NO: 1170 - protein, 158 aa, Human papillomavirus type 18
MARFEDPTRRPYKLPDLCTELNTSLQDIEITCVYCKTVLELTEVFEFAFKDLFVVYRDSIPHAACHKCIDFYSRIRELRHYSDSVYGDTLEKLTNTGLYNLLIRCLRCQKPLNPAEKLRHLNEKRRFHNIAGHYRGQCHSCCNRARQERLQRRRETQV

SEQ ID NO: 1171 - protein, 150 aa, Human papillomavirus type 11
MESKDASTSATSIDQLCKTFNLSLHTLQIQCVFCRNALTTAEIYAYAYKNLKVVWRDNFPFAACACCLELQGKINQYRHFNYAAYAPTVEEETNEDILKVLIRCYLCHKPLCEIEKLKHILGKARFIKLNNQWKGRCLHCWTTCMEDLLP

SEQ ID NO: 1172 - protein, 150 aa, Human papillomavirus type 6
MESANASTSATTIDQLCKTFNLSMHTLQINCVFCKNALTTAEIYSYAYKQLKVLFRGGYPYAACACCLEFHGKINQYRHFDYAGYATTVEEETKQDILDVLIRCYLCHKPLCEVEKVKHILTKARFIKLNCTWKGRCLHCWTTCMEDMLP

SEQ ID NO: 1173 - protein, 98 aa, Human papillomavirus type 6
MHGRHVTLKDIVLDLQPPDPVGLHCYEQLVDSSEDEVDEVDGQDSQPLKQHFQIVTCCCGCDSNVRLVVQCTETDIREVQQLLLGTLNIVCPICAPKT

SEQ ID NO: 1174 - protein, 98 aa, Human papillomavirus type 11
MHGRLVTLKDIVLDLQPPDPVGLHCYEQLEDSSEDEVDKVDKQDAQPLTQHYQILTCCCGCDSNVRLVVECTDGDIRQLQDLLLGTLNIVCPICAPKP

SEQ ID NO: 1175 - protein, 98 aa, Human papillomavirus type 16; identical to SEQ ID NO: 91

SEQ ID NO: 1176 - protein, 105 aa, Human papillomavirus type 18
MHGPKATLQDIVLHLEPQNEIPVDLLCHEQLSDSEEENDEIDGVNHQHLPARRAEPQRHTMLCMCCKCEARIKLVVESSADDLRAFQQLFLNTLSFVCPWCASQQ

SEQ ID NO: 1177 - protein, 188 aa, Homo sapiens [sequence omitted]

SEQ ID NO: 1178 - protein, 330 aa, Homo sapiens
MADIIARLREDGIQKRVIQEGRGELPDFQDGTKATFHYRTLHSDDEGTVLDDSRARGKPMELIIGKKFKLPVWETIVCTMREGEIAQFLCDIKHVVLYPLVAKSLRNIAVGKDPLEGQRHCCGVAQMREHSSLGHADLDALQQNPQPLIFHMEMLKVESPGTYQQDPWAMTDEEKAKAVPLIHQEGNRLYREGHVKEAAAKYYDAIACLKNLQMKEQPGSPEWIQLDQQITPLLLNYCQCKLVVEEYYEVLDHCSSILNKYDDNVKAYFKRGKAHAAVWNAQEAQADFAKVLELDPALAPVVSRELQALEARIRQKDEEDKARFRGIFSH

SEQ ID NO: 1179 - protein, 1397 aa, Homo sapiens
MEEISAAAVKVVPGPERPSPFSQLVYTSNDSYIVHSGDLRKIHKAASRGQVRKLEKMTKRKKTINLNIQDAQKRTALHWACVNGHEEVVTFLVDRKCQLDVLDGEHRTPLMKALQCHQEACANILIDSGADINLVDVYGNTALHYAVYSEILSVVAKLLSHGAVIEVHNKASLTPLLLSITKRSEQIVEFLLIKNANANAVNKYKCTALMLAVCHGSSEIVGMLLQQNVDVFAADICGVTAEHYAVTCGFHHIHEQIMEYIRKLSKNHQNTNPEGTSAGTPDEAAPLAERTPDTAESLVEKTPDEAAPLVERTPDTAESLVEKTPDEAASLVEGTSDKIQCLEKATSGKFEQSAEETPREITSPAKETSEKFTWPAKGRPRKIAWEKKEDTPREIMSPAKETSEKFTWAAKGRPRKIAWEKKETPVKTGCVARVTSNKTKVLEKGRSKMIACPTKESSTKASANDQRFPSESKQEEDEEYSCDSRSLFESSAKIQVCIPESIYQKVMEINREVEEPPKKPSAFKPAIEMQNSVPNKAFELKNEQTLRADPMFPPESKQKDYEENSWDSESLCETVSQKDVCLPKATHQKEIDKINGKLEESPNKDGLLKATCGMKVSIPTKALELKDMQTFKAEPPGKPSAFEPATEMQKSVPNKALELKNEQTLRADEILPSESKQKDYEENSWDTESLCETVSQKDVCLPKAAHQKEIDKINGKLEGSPVKDGLLKANCGMKVSIPTKALELMDMQTFKAEPPEKPSAFEPAIEMQKSVPNKALELKNEQTLRADEILPSESKQKDYEESSWDSESLCETVSQKDVCLPKATHQKEIDKINGKLEESPDNDGFLKAPCRMKVSIPTKALELMDMQTFKAEPPEKPSAFEPAIEMQKSVPNKALELKNEQTLRADQMFPSESKQKKVEENSWDSESLRETVSQKDVCVPKATHQKEMDKISGKLEDSTSLSKILDTVHSCERARELQKDHCEQRTGKMEQMKKKFCVLKKKLSEAKEIKSQLENQKVKWEQELCSVRLTLNQEEEKRRNADILNEKIREELGRIEEQHRKELEVKQQLEQALRIQDIELKSVESNLNQVSHTHENENYLLHENCMLKKEIAMLKLEIATLKHQYQEKENKYFEDIKILKEKNAELQMTLKLKEESLTKRASQYSGQLKVLIAENTMLTSKLKEKQDKEILEAEIESHHPRLASAVQDHDQIVTSRKSQEPAFHIAGDACLQRKMNVDVSSTIYNNEVLHQPLSEAQRKSKSLKINLNYAGDALRENTLVSEHAQRDQRETQCQMKEAEHMYQNEQDNVNKHTEQQESLDQKLFQLQSKNMWLQQQLVHAHKKADNKSKITIDIHFLERKMQHHLLKEKNEEIFNYNNHLKNRIYQYEKEKAETENS

SEQ ID NO: 1180 - protein, 2322 aa, Homo sapiens
MQSGPRPPLPAPGLALALTLTMLARLASAASFFGENHLEVPVATALTDIDLQLQFSTSQPEALLLLAAGPADHLLLQLYSGRLQVRLVLGQEELRLQTPAETLLSDSIPHTVVLTVVEGWATLSVDGFLNASSAVPGAPLEVPYGLFVGGTGTLGLPYLRGTSRPLRGCLHAATLNGRSLLRPLTPDVHEGCAEEFSASDDVALGFSGPHSLAAFPAWGTQDEGTLEFTLTTQSRQAPLAFQAGGRRGDFIYVDIFEGHLRAVVEKGQGTVLLHNSVPVADGQPHEVSVHINAHRLEISVDQYPTHTSNRGVLSYLEPRGSLLLGGLDAEASRHLQEHRLGLTPEATNASLLGCMEDLSVNGQRRGLREALLTRNMAAGCRLEEEEYEDDAYGHYEAFSTLAPEAWPAMELPEPCVPEPGLPPVFANFTQLLTISPLVVAEGGTAWLEWRHVQPTLDLMEAELRKSQVLFSVTRGARHGELELDIPGAQARKMFTLLDVVNRKARFIHDGSEDTSDQLVLEVSVTARVPMPSCLRRGQTYLLPIQVNPVNDPPHIIFPHGSLMVILEHTQKPLGPEVFQAYDPDSACEGLTFQVLGTSSGLPVERRDQPGEPATEFSCRELEAGSLVYVHRGGPAQDLTFRVSDGLQASPPATLKVVAIRPAIQIHRSTGLRLAQGSAMPILPANLSVETNAVGQDVSVLFRVTGALQFGELQKQGAGGVEGAEWWATQAFHQRDVEQGRVRYLSTDPQHHAYDTVENLALEVQVGQEILSNLSFPVTIQRATVWMLRLEPLHTQNTQQETLTTAHLEATLEEAGPSPPTFHYEVVQAPRKGNLQLQGTRLSDGQGFTQDDIQAGRVTYGATARASEAVEDTFRFRVTAPPYFSPLYTFPIHIGGDPDAPVLTNVLLVVPEGGEGVLSADHLFVKSLNSASYLYEVMERPRHGRLAWRGTQDKTTMVTSFTNEDLLRGRLVYQHDDSETTEDDIPFVATRQGESSGDMAWEEVRGVFRVAIQPVNDHAPVQTISRIFHVARGGRRLLTTDDVAFSDADSGFADAQLVLTRKDLLFGSIVAVDEPTRPIYRFTQEDLRKRRVLFVHSGADRGWIQLQVSDGQHQATALLEVQASEPYLRVANGSSLVVPQGGQGTIDTAVLHLDTNLDIRSGDEVHYHVTAGPRWGQLVRAGQPATAFSQQDLLDGAVLYSHNGSLSPRDTMAFSVEAGPVHTDATLQVTIALEGPLAPLKLVRHKKIYVFQGEAAEIRRDQLEAAQEAVPPADIVFSVKSPPSAGYLVMVSRGALADEPPSLDPVQSFSQEAVDTGRVLYLHSRPEAWSDAFSLDVASGLGAPLEGVLVELEVLPAAIPLEAQNFSVPEGGSLTLAPPLLRVSGPYFPTLLGLSLQVLEPPQHGALQKEDGPQARTLSAFSWRMVEEQLIRYVHDGSETLTDSFVLMANASEMDRQSHPVAFTVTVLPVNDQPPILTTNTGLQMWEGATAPIPAEALRSTDGDSGSEDLVYTIEQPSNGRVVLRGAPGTEVRSFTQAQLDGGLVLFSHRGTLDGGFRFRLSDGEHTSPGHFFRVTAQKQVLLSLKGSQTLTVCPGSVQPLSSQTLRASSSAGTDPQLLLYRVVRGPQLGRLFHAQQDSTGEALVNFTQAEVYAGNILYEHEMPPEPFWEAHDTLELQLSSPPARDVAATLAVAVSFEAACPQRPSHLWKNKGLWVPEGQRARITVAALDASNLLASVPSPQRSEHDVLFQVTQFPSRGQLLVSEEPLHAGQPHFLQSQLAAGQLVYAHGGGGTQQDGFHFRAHLQGPAGASVAGPQTSEAFAITVRDVNERPPQPQASVPLRLTRGSRAPISRAQLSVVDPDSAPGEIEYEVQRAPHNGFLSLVGGGLGPVTRFTQADVDSGRLAFVANGSSVAGIFQLSMSDGASPPLPMSLAVDILPSAIEVQLRAPLEVPQALGRSSLSQQQLRVVSDREEPEAAYRLIQGPQYGHLLVGGRPTSAFSQFQIDQGEVVFAFTNFSSSHDHFRVLALARGVNASAVVNVTVRALLHVWAGGPWPQGATLRLDPTVLDAGELANRTGSVPRFRLLEGPRHGRVVRVPRARTEPGGSQLVEQFTQQDLEDGRLGLEVGRPEGRAPGPAGDSLTLELWAQGVPPAVASLDFATEPYNAARPYSVALLSVPEAARTEAGKPESSTPTGEPGPMASSPEPAVAKGGFLSFLEANMFSVIIPMCLVLLLLALILPLLFYLRKRNKTGKHDVQVLTAKPRNGLAGDTETFRKVEPGQAIPLTAVPGQGPPPGGQPDPELLQFCRTPNPALKNGQYWV

SEQ ID NO: 1181 - protein, 760 aa, Homo sapiens
MKTWVKIVFGVATSAVLALLVMCIVLRPSRVHNSEENTMRALTLKDILNGTFSYKTFFPNWISGQEYLHQSADNNIVLYNIETGQSYTILSNRTMKSVNASNYGLSPDRQFVYLESDYSKLWRYSYTATYYIYDLSNGEFVRGNELPRPIQYLCWSPVGSKLAYVYQNNIYLKQRPGDPPFQITFNGRENKIFNGIPDWVYEEEMLATKYALWWSPNGKFLAYAEFNDTDIPVIAYSYYGDEQYPRTINIPYPKAGAKNPVVRIFIIDTTYPAYVGPQEVPVPAMIASSDYYFSWLTWVTDERVCLQWLKRVQNVSVLSICDFREDWQTWDCPKTQEHIEESRTGWAGGFFVSTPVFSYDAISYYKIFSDKDGYKHIHYIKDTVENAIQITSGKWEAINIFRVTQDSLFYSSNEFEEYPGRRNIYRISIGSYPPSKKCVTCHLRKERCQYYTASFSDYAKYYALVCYGPGIPISTLHDGRTDQEIKILEENKELENALKNIQLPKEEIKKLEVDEITLWYKMILPPQFDRSKKYPLLIQVYGGPCSQSVRSVFAVNWISYLASKEGMVIALVDGRGTAFQGDKLLYAVYRKLGVYEVEDQITAVRKFIEMGFIDEKRIAIWGWSYGGYVSSLALASGTGLFKCGIAVAPVSSWEYYASVYTERFMGLPTKDDNLEHYKNSTVMARAEYFRNVDYLLIHGTADDNVHFQNSAQIAKALVNAQVDFQAMWYSDQNHGLSGLSTNHLYTHMTHFLKQCFSLSD

SEQ ID NO: 1182 - protein, 140 aa, Homo sapiens
MVRYRVRSLSERSHEVYRQQLHGQEQGHHGQEEQGLSPEHVEVYERTHGQSHYRRRHCSRRRLHRIHRRQHRSCRRRKRRSCRHRRRHRRESLGDPLNQNFLSQKAAEPGREHAEGTKLPGPLTPSWKLRKSRPKHQVRP

SEQ ID NO: 1183 - protein, 595 aa, Homo sapiens
SHSCVVRDWRCILVLVITLMWPQPHLPPHPMMSEKTRQNKLAEAKKKFTDYRQWNIAGVGTGATDTKKKKINHGTNPETTTSGGCHSPEDTQQNRAQLKEEKKMREQEDVETGGEAAGAGEADVGAGGEDAGSGAEDVGPGGEDVGAGREAAAEGGENAGAEDVAAGGEDAGGEEDAGAGEEDMGPGEDARGGEHAGAGEEDAGGGGDDAGAGGEDAGAGRKDAGAGGGDVGAGGEDVGAGREDVGAAEATGTEGEAVGTREDAGAGEDMGAGGEDAGPGGEDAGPGGEDAGAGGEDAGAGGEDVGAGGEDVGAGGEDVGPGGEDVGAGGEDVGPGGEDAGGRRRRCGGRRRRCGARRRRCGGRRRRCGGQEEKMRGAGGEDAGDRRRRCGGQEEKMREQEEKMREQEEKMQGQEEKMREQEEKMRGQEEKMREQEEKMRGQEEKMWGQEEKMWGQEEKMWGQEEMMREKEERIDQKEKMQERLPEHEERCSEPCLPPSKVLCNMSHTGSVEPAGGEAGEGSPQDNPTAQEIMQLFCGMKNAQQCPGLGSTSCIPFFYRGDKRKMKIINIKLALSTRPTEAAAMSLCEYSLSTNL
